(19) United States
(12) Patent Application Publication
(10) Pub. No.: US 2021/0363531 A1
(43) Pub. Date: Nov. 25, 2021

(54) TARGETING KIT WITH SPLICE SWITCHING OLIGONUCLEOTIDES TO INDUCE APOPTOSIS OF MAST CELLS

(71) Applicant: North Carolina State University, Raleigh, NC (US)

(72) Inventor: Glenn P. Cruse, Apex, NC (US)

(21) Appl. No.: 17/272,190

(22) PCT Filed: Aug. 27, 2019
(86) PCT No.: PCT/US2019/048400

§ 371 Date: Feb. 26, 2021

Related U.S. Application Data
(60) Provisional application No. 62/723,326, filed on Aug. 27, 2018.

(51) Int. Cl. C12N 15/113; A61P 35/00

(52) U.S. Cl. CPC C12N 15/1135; A61P 35/00; C12N 2320/33; C12N 2310/51; C12N 2310/3233; C12N 2310/11

(57) ABSTRACT

Compositions and methods for modulating Kit biological activities are provided. In some embodiments, the presently disclosed subject matter provides antisense oligomers having 10 to 50 linked nucleotides, wherein the antisense oligomer is targeted to a region of a Kit-encoding pre-mRNA, and further wherein the targeted region includes sequences involved in splicing of the Kit-encoding pre-mRNA. Also provided are expression vectors encoding the antisense oligomers disclosed herein, morpholino oligomer derivatives of the presently disclosed antisense oligomers, pharmaceutical compositions that include the disclosed antisense oligomers, expression vectors, and/or morpholino oligomers, and methods for modulating splicing of a Kit pre-RNA in a cell and/or a tissue, inducing apoptosis in mast cells, and treating diseases, disorders, and/or conditions associated with Kit expression.

### RELATED APPLICATIONS

[0001] This application is a U.S. national phase filing based on PCT International Patent Application Serial No. PCT/US2019/048400, filed Aug. 27, 2019, which claims priority to and the benefit of U.S. Provisional Patent Application Ser. No. 62/723,326, filed Aug. 27, 2018; the disclosure of which is incorporated herein by reference in its entirety.

### GRANT STATEMENT

[0002] This invention was made with government support under grant number ES025128 awarded by the National Institutes of Health. The government has certain rights in the invention.

### TECHNICAL FIELD

[0003] The presently disclosed subject matter relates in some embodiments to targeting Kit gene products, including but not limited to RNA transcripts transcribed form a Kit genomic locus, with splice switching oligonucleotides to induce apoptosis of mast cells. The presently disclosed subject matter relates in some embodiments to applications for selective targeting of mast cells and Kit-related neoplastic diseases.

### INTRODUCTION

[0004] c-Kit is a proto-oncogene that is highly conserved between species and encodes the receptor tyrosine kinase, Kit (also known as CD117 and/or the mast/stem cell growth factor receptor (SCFR)). Kit plays a role in the proliferation, survival, and differentiation of bone marrow-derived hematopoietic stem cells, including mast cell (MC) progenitors (reviewed by Pittoni et al., 2011). Expression of Kit in most hematopoietic cells is lost during differentiation, but MCs retain Kit expression throughout their lifespan, and Kit signaling remains essential for MC survival and proliferation (Tsai M et al., 1991; Mekori et al., 1993; Iemura et al., 1994; Galli et al., 1995). The oncogenic potential of c-Kit was initially realized when its viral counterpart, v-Kit, was found to be responsible for the transforming activity of the Hardy-Zuckerman IV feline sarcoma virus (Besmer et al., 1986). Subsequently, activating gain-of-function c-Kit mutations have been associated with the initiation and progression of several human malignancies, with a particularly high occurrence in gastrointestinal stromal tumors (GISTs) and MC proliferative disorders such as mastocytosis and MC leukemia (reviewed in Cruse et al., 2014).

[0005] Mastocytosis is a rare and heterogeneous group of neoplastic conditions characterized by aberrant expansion and accumulation of MCs (Valent et al., 2017). The disease can be difficult to treat due to the extensive biological heterogeneity of mastocytosis subtypes, all of which are characterized by the neoplastic growth of MCs but which exhibit distinct clinical manifestations and treatment responses (Valent et al., 2017). Current frontline treatments for mastocytosis and Kit-driven neoplasia include chemotherapy and tyrosine kinase inhibitors (TKIs; Gleixner et al., 2006; Gotlib et al., 2016. However, these treatments are not always effective in advanced disease, in which complete remission or improved prognosis is rare. Moreover, due to the non-specific nature of chemotherapeutics and TKIs, there is a high risk of off-target toxicity (Jensen et al., 2008). Consequently, the development of Kit-specific therapeutic approaches with a better safety profile remains a need in the art.

[0006] With a strong connection to cancer development and aberrant MC growth, Kit gene products represent a desirable but challenging therapeutic target. Human c-Kit, located on human chromosome 4q12 (Giebel et al., 1992), contains 21 exons and is susceptible to an array of mutations. The most clinically significant of these are gain-of-function mutations that impart conformational changes in the receptor, and enable tyrosine kinase activity independently from the Kit ligand, stem cell factor (SCF) (reviewed in Cruse et al., 2014; Arock et al., 2015). Wild-type Kit is composed of distinct domains, including an SCF-binding extracellular domain, a transmembrane domain, an autoinhibitory juxtamembrane domain and two intracellular tyrosine kinase domains, which are capable of autophosphorylation (Cruse et al., 2014; Arock et al., 2015). Under normal situations, Kit-SCF interactions are necessary for the survival, proliferation, and differentiation of MCs, but in the presence of activating mutations, SCF-dependence is lost and oncogenic Kit signaling drives neoplastic MC growth.

[0007] Although mutations are known occur throughout the Kit gene, many cluster in hotspots, which are associated with different diseases (Cruse et al., 2014). For example, mutations in exon 11, which encodes the juxtamembrane domain of Kit, commonly occur in GISTs (Taniguchi et al., 1999; Miettinen et al., 2002), while the D816V point mutation in exon 17, encoding the second kinase domain, is detected in the majority of patients with systemic mastocytosis (Arock et al., 2015). Identifying patient mutations is important for assessing disease prognosis and determining treatment approaches, because the type of mutation and the occurrence of additional mutations dictate the success of therapies for Kit-associated malignancies. In particular, the missense mutation D816V, found in greater than 80% of adult systemic mastocytosis cases (Arock et al., 2015), causes a conformational change in Kit that renders it resistant to TKIs such as imatinib mesylate (Gleevec; Ma et al., 2002; Pardanani et al., 2003) that target the inactive ATP-binding site conformation of Kit.

[0008] Due to the heterogeneity of c-Kit mutations in Kit-associated malignancies and the occurrence of mutations that confer resistance to TKIs disclosed herein in some embodiments are compositions and methods for targeting of Kit expression as an approach to therapy. Since standard siRNA approaches are inefficient at silencing Kit, (Wu et al., 2012; Yang et al., 2015), particularly in vivo, in some embodiments of the presently disclosed subject matter chemically stable antisense oligonucleotides (ASOs) that induce aberrant splicing of pre-mRNA (such as but not limited to exon skipping) are employed to alter the expression of c-Kit gene products. In exemplary embodiments of the presently disclosed subject matter, an exon skipping oligonucleotide (ESO), termed KitStop, targets c-Kit expression by introducing a frameshift into mature c-Kit mRNA transcripts. This results in an immediate STOP codon and loss-of-function. KitStop downregulates both wild-type and mutant Kit expression in MCs, which prevents proliferation and induces rapid cell death in vitro. Administration of KitStop ESO into the peritoneal cavity or skin significantly reduces MC numbers in these tissues in vivo. These data demonstrate that KitStop ESOs can deplete MCs in the animal body, and acts as proof-of-principle for therapeutic utility in Kit-associated malignancies. Given the recent approval of the ESO eteplirsen by the Food and Drug Administration for the treatment of Duchenne muscular dystrophy (DMD; Dowling, 2016; Syed, 2016), the presently disclosed subject matter provides a Kit-targeted therapeutic.

### SUMMARY

[0009] This summary lists several embodiments of the presently disclosed subject matter, and in many cases lists variations and permutations of these embodiments. This summary is merely exemplary of the numerous and varied embodiments. Mention of one or more representative features of a given embodiment is likewise exemplary. Such an embodiment can typically exist with or without the feature(s) mentioned; likewise, those features can be applied to other embodiments of the presently disclosed subject matter, whether listed in this summary or not. To avoid excessive repetition, this Summary does not list or suggest all possible combinations of such features.

[0010] In some embodiments, the presently disclosed subject matter provides antisense oligomers comprising 10 to 50 linked nucleotides, wherein the antisense oligomers are targeted to a region of a Kit-encoding pre-mRNA, and further wherein the targeted region comprises sequences involved in splicing of the Kit-encoding pre-mRNA. In some embodiments, hybridization of the antisense oligomer to the Kit-encoding pre-mRNA alters splicing of the pre-mRNA. In some embodiments, hybridization of the antisense oligomer to the Kit-encoding pre-mRNA reduces expression of Kit protein. In some embodiments, the Kit protein for which expression is reduced is a wild type Kit protein or a mutant Kit protein. In some embodiments, the targeted region comprises at least a portion of a polynucleotide sequence selected from the group consisting of an intron sequence, an exon sequence, a sequence comprising an intron/exon junction, a splice donor sequence, a slice acceptor sequence, a splice enhancer sequence, a splice branch point sequence, or a polypyrimidine tract. In some embodiments, the polynucleotide sequence is selected from the group consisting of an exon 4 splice donor sequence. In some embodiments, the Kit-encoding pre-mRNA is transcribed from a c-Kit gene. In some embodiments, the Kit protein is selected from the group consisting of a human Kit protein, a murine Kit protein, a canine Kit protein, a feline Kit protein, and an equine protein. In some embodiments, hybridization of the antisense oligomer to the c-Kit pre-mRNA results in production of a mature c-Kit mRNA molecule that lacks at least a portion of exon 4. In some embodiments, hybridization of the antisense oligomer to the c-Kit pre-mRNA results in production of an mRNA molecule encoding a truncated Kit protein. In some embodiments, the 10 to 50 linked nucleotides comprises a targeting nucleic acid sequence sufficiently complementary to a target nucleic acid sequence in the Kit-encoding pre-mRNA, such that the oligonucleotide specifically hybridizes to the target sequence. In some embodiments, hybridization of the antisense oligomer to the Kit-encoding pre-mRNA alters splicing of the pre-mRNA. In some embodiments, hybridization of the antisense oligomer to the Kit-encoding pre-mRNA reduces expression of Kit protein. In some embodiments, the Kit protein for which expression is reduced is a wild type Kit protein or a mutant Kit protein.

[0011] In some embodiments, the targeting sequence comprises at least 6 contiguous nucleobases fully complementary to at least 6 contiguous nucleobases in the target sequence. In some embodiments, the targeting sequence is at least 80% complementary over its entire length to a similarly sized run of contiguous nucleobases in the target sequence. In some embodiments, the target sequence comprises at least a portion of a polynucleotide sequence selected from the group consisting of an intron sequence, an exon sequence, a sequence comprising an intron/exon junction, a splice donor sequence, a slice acceptor sequence, a splice enhancer sequence, a splice branch point sequence, or a polypyrimidine tract. In some embodiments, the polynucleotide sequence is associated with a Kit exon selected from the group consisting of Kit exons 2-20, such as but not limited to an exon 4 splice donor sequence. In some embodiments, the Kit-encoding pre-mRNA is transcribed from a c-Kit gene. In some embodiments, the Kit protein is selected from the group consisting of a human Kit protein, a murine Kit protein, a canine Kit protein, a feline Kit protein, and an equine protein.

[0012] In some embodiments, the target sequence comprises at least a portion of a polynucleotide sequence selected from the group consisting of SEQ ID NOs: 18-22, optionally SEQ ID NOs: 23-60. In some embodiments, the portion is at least 10 contiguous nucleotides. In some embodiments, the target sequence comprises a sequence at least 90% identical to a subsequence of SEQ ID NOs: 18-22, optionally SEQ ID NOs: 23-60. In some embodiments, the target sequence comprises a sequence selected from the group consisting of the reverse complement of SEQ ID NOs: 1 and 2 and SEQ ID NOs: 23-60. In some embodiments, the targeting sequence comprises at least 10 contiguous nucleobases identical in sequence to at least 10 contiguous nucleobases in a sequence selected from the group consisting of SEQ ID NOs: 1, 2, and the reverse complement of one of SEQ ID NOs: 23-60. In some embodiments, the targeting sequence comprises a sequence at least 80% complimentary to the reverse complement of at least a portion of a subsequence of SEQ ID NOs: 18-22, optionally SEQ ID NOs: 23-60. In some embodiments, the targeting sequence is at least 80% identical over the full length of a sequence selected from the group consisting of SEQ ID NOs: 1, 2, and the reverse complement of one of SEQ ID NOs: 23-60. In some embodiments, the targeting sequence is selected from the group consisting of SEQ ID NOs: 1, 2, and the reverse complement of one of SEQ ID NOs: 23-60.

[0013] In some embodiments, the c-Kit transcript comprises any of SEQ ID NOs: 8, 10, 12, 14, and 16, or an open reading frame present therein.

[0014] In some embodiments, the antisense oligomer is an antisense RNA molecule. In some embodiments, the antisense RNA molecule comprises a modification selected from the group consisting of a nucleotide modification, an internucleotide modification, a sugar modification, a sugar-internucleotide linkage modification, and combinations thereof. In some embodiments, the antisense oligomer is a morpholino oligomer.

[0015] In some embodiments, the presently disclosed subject matter also provides expression vectors encoding an antisense oligomer as described herein.

[0016] In some embodiments, the presently disclosed subject matter also provides pharmaceutical compositions comprising the antisense oligomers described herein, the expression vectors described herein, and/or the morpholino oligomers described herein.

[0017] In some embodiments, the presently disclosed subject matter also provides methods for modulating splicing of Kit-encoding pre-RNAs in cells and/or tissues. In some embodiments, the methods comprise contacting the cells and/or the tissues with an antisense oligomer as described herein, an expression vector as described herein, and/or a morpholino oligomer as described herein.

[0018] In some embodiments, the presently disclosed subject matter also provides methods for inducing apoptosis in mast cells. In some embodiments, the presently disclosed methods comprise contacting the mast cells with an antisense oligomer as described herein, an expression vector as described herein, and/or a morpholino oligomer as described herein.

[0019] In some embodiments of the presently disclosed methods, the methods are performed in an individual.

[0020] In some embodiments, the presently disclosed subject matter also provides methods for treating diseases, disorders, and/or conditions associated with Kit expression in individuals. In some embodiments, the methods comprise administering to an individual an antisense oligomer as described herein, an expression vector as described herein, and/or a morpholino oligomer as described herein. In some embodiments, a disease, disorder, and/or condition associated with Kit expression is a cancer or mastocytosis. In some embodiments, the cancer is a gastrointestinal stromal tumor or leukemia. In some embodiments, the individual is an animal, optionally a mammal. In some embodiments, the individual is a human, a mouse, a dog, a cat, or a horse.

[0021] Thus, it is an object of the presently disclosed subject matter to provide for targeting Kit gene products with splice switching oligonucleotides to induce apoptosis of mast cells and for selective targeting of mast cells and Kit-related neoplastic diseases

[0022] An object of the presently disclosed subject matter having been stated hereinabove, and which is achieved in whole or in part by the compositions and methods disclosed herein, other objects will become evident as the description proceeds when taken in connection with the accompanying Figures as best described herein below.

### BRIEF DESCRIPTION OF THE FIGURES

[0023] The accompanying drawings, which are incorporated herein by reference and constitute a part of this specification, illustrate several representative embodiments of the presently disclosed subject matter and together with the description illustrate the disclosed compositions and methods.

[0024] FIGS. 1A-1C: ESO-mediated alternative splicing of exon 4 in c-Kit pre-mRNA. (FIG. 1A) KitStop ESO was designed to target the donor splice site of exon 4, which led to exclusion of exon 4 by the spliceosome. This is predicted to introduce a premature stop codon and result in a truncated mRNA transcript, even in the presence of G560V and D816V activating mutations, which are located downstream of the target site of to KitStop. Boxes represent exons; thick black bar represents introns. FL-c-Kit=full-length c-Kit, t-c-Kit=truncated c-Kit. (FIG. 1B) Gel electrophoresis data demonstrating splice-switching of wild-type and mutant c-Kit by KitStop ESO in comparison to standard control ASO (Stndcon) in HMC-1.2 (FIG. 1B) and LAD2 cells (FIG. 1C), respectively, as assessed by analysis of total RNA by RT-PCR. Black arrow=full-length c-Kit, gray arrow=alternatively spliced c-Kit.

[0025] FIGS. 2A-2F: Transfection of KitStop ESO leads to loss of wild-type Kit expression. Following transfection of LAD2 cells with 10 μM standard control ASO (Stndcon) or KitStop ESO, Kit expression was assessed by flow cytometry. (FIG. 2A) Flow cytometry histograms of surface (FIG. 2A) and total (FIG. 2B) wild-type Kit expression at Day 2 (top panels) and Day 7 (bottom panels) following transfection with KitStop ESO. Mean flow cytometry data for surface (FIG. 2C) and total (FIG. 2D) Kit expression calculated from the geometric MFI and expressed as a percentage of Stndcon. Data are the mean±SEM from 3 independent experiments. ***p<0.001, ****p<0.0001, ANOVA with Sidak's post-test. Representative flow cytometry gating strategies and plots of LAD2 cells labeled with anti-human CD117 antibodies are provided in FIGS. 2E and 2F. Following transfection of LAD2 cells with 10 μM KitStop ESO, LAD2 cells were assessed by flow cytometry for Kit expression. Representative density plots and gates of live (FIG. 2E), and fixed and permeabilized (FIG. 2F) LAD2 cells labeled with APC-conjugated anti-human CD117 antibody. Stndcon=standard control ASO. I: isotype; S: Stndcon; K: KitStop.

[0026] FIGS. 3A-3F: Transfection of KitStop ESO leads to loss of mutant Kit expression. Following transfection of HMC-1.2 cells with 10 μM standard control ASO (Stndcon) or KitStop ESO, HMC-1.2 cells were assessed by flow cytometry for Kit expression. (FIG. 3A) Flow cytometry histograms of total Kit expression at 24 (top panel) 48 (middle panel) and 72 h (bottom panel) following transfection with KitStop ESO. (FIG. 3B) Mean flow cytometry data for total Kit expression calculated from the geometric mean fluorescence intensity (MFI) (FIG. 3B) and expressed as a percentage of standard control (Stndcon) ASO (FIG. 3C). Data are the mean±SEM from 3 independent experiments. *p<0.05, **p<0.01, ***p<0.001, ANOVA with Sidak's post-test. Representative flow cytometry gating strategies and plots of HMC-1.2 cells labeled with anti-human CD117 antibodies. Representative density plots and gates of fixed and permeabilized HMC-1.2 cells transfected with 10 μM KitStop ESO and labeled with APC-ft) conjugated anti-human CD117 antibody after 24 hours (FIG. 3D), 48 hours (FIG. 3E), and 72 hours (FIG. 3F). KitStop treated cells have reduced Kit expression and reduced forward scatter, indicating cell shrinkage. Stndcon=standard control ASO. I: isotype; S: Stndcon; K: KitStop.

[0027] FIGS. 4A-4C. KitStop reduces constitutive KIT signaling in HMC-1.2 cells. (FIG. 4A) Immunoblots of constitutive phosphorylation of KIT and ERK in HMC-1.2 cells after 24 h of KitStop treatment from three independent experiments shown from left to right. (FIGS. 4B and 4C) Combined phosphorylation data for pKIT (FIG. 4B) and pERK (FIG. 4C) after correction against β-actin or total ERK, respectively, and normalized to phosphorylation in control cells. Data are the mean±SEM from 3 independent experiments. *p<0.05 using a Student's paired t-test.

[0028] FIGS. 5A-5G: Transfection of KitStop ESO increases HMC-1.2 cell apoptosis. Following transfection of HMC-1.2 cells with 10 μM standard control ASO (Stndcon) or KitStop ESO, HMC-1.2 cells were assessed by flow cytometry for apoptosis by staining with Annexin V-FITC. (FIG. 5A) Histograms showing the shift in Annexin V positive staining of KitStop-transfected cells in comparison to Stndcon and unstained cells. (FIG. 5B) Combined data from flow cytometry for Annexin V expressed as the geometric MFI. (FIG. 5C) Percentage of HMC-1.2 cells within non-apoptotic (FIG. 5C), early apoptotic (FIG. 5D) and late apoptotic (FIG. 5E) gates at each time point. Data are the mean±SEM from 3 independent experiments. *p<0.05, **p<0.01, ***p<0.001, ANOVA with Sidak's post-test. Representative flow cytometry gating strategies and plots of HMC-1.2 cells stained with Annexin V-FITC. (FIG. 5F) Gating strategy and representative density plots of live, untreated HMC-1.2 cells, either unstained or stained with Annexin V-FITC. (FIG. 5G) Flow cytometry density plots of Annexin V staining intensity of HMC-1.2 cells at each time point after transfection with standard control ASO (Stndcon) or KitStop ESO. Apoptotic cells are smaller when measured by forward scatter (X axes) and become annexin V positive (Y axes). U: unlabeled; S: Stndcon; K: KitStop.

[0029] FIGS. 6A-6J: Transfection of KitStop ESO decreases HMC-1.2 cell viability. Following transfection of HMC-1.2 cells with 10 μM standard control ASO (Stndcon) or KitStop ESO, HMC-1.2 cell viability was assessed by flow cytometry by staining with propidium iodide (PI). Percentage of PI negative and positive cells at 24 h (FIG. 6A), 48 h (FIG. 6B), and 72 h (FIG. 6C). (FIG. 6D) Flow cytometry histograms at 24 (left panel), 48 (middle panel) and 72 h (right panel) of HMC-1.2 cells stained with LIVE/DEAD Green Dead Cell stain. (FIG. 6E) Combined geometric MFI of LIVE/DEAD staining in HMC-1.2 cells at each time point. Data are the mean±SEM from 3 independent experiments. *p<0.05, **p<0.01, ***p<0.001, ANOVA with Sidak's post-test. Representative flow cytometry gating strategies and plots of HMC-1.2 cells stained with propidium iodide. (FIG. 6F) Representative density plots of HMC-1.2 cells stained with propidium iodide (PI). Flow cytometry density plots of PI staining intensity of HMC-1.2 cells at each time point after transfection with standard control ASO (Stndcon) (FIG. 6G) or KitStop ESO (FIG. 6H). Flow cytometry gating strategies for HMC-1.2 cells with LIVE/DEAD stain. (FIG. 6I) Representative density plots demonstrating (FIG. 6I) gating of live HMC-1.2 cells and single cell populations and (FIG. 6J) gating of untreated cells following application of LIVE/DEAD Green Dead Cell stain. U: unlabeled; S: Stndcon; K: KitStop.

[0030] FIGS. 7A-7E: Transfection of KitStop ESO decreases HMC-1.2 cell proliferation. Following transfection of HMC-1.2 cells with 10 μM standard control ASO (Stndcon) or KitStop ESO, HMC-1.2 cell proliferation was assessed by cell counts and flow cytometry. (FIG. 7A) Total number of viable HMC-1.2 cells cultured under normal conditions assessed by Trypan blue counts. (FIG. 7B) Representative density plots of HMC-1.2 cells loaded with CellTrace prior to transfection with Stndcon ASO (top panels) or KitStop ESO (bottom panels) and stained with LIVE/DEAD Green Dead Cell stain at 24 (left panels) 48 (middle panels) and 72 h (right panels). Cells transfected with Stndcon demonstrated a loss of CellTrace fluorescence intensity due to dye dilution between daughter cells, indicating cell proliferation. In contrast, KitStop-transfected cells retained CellTrace fluorescence, except for a small population at 72 h, and exhibited increased LIVE/DEAD staining intensity. (FIG. 7C) Percentage of total cells in bottom left quadrants (CellTrace^{low}; LIVE/DEAD^{negative}) corresponding to proliferating cells. (FIG. 7D) Percentage of total cells in the top and bottom right quadrants corresponding to non-proliferating cells (CellTrace^{high}). (FIG. 7E) Percentage of total cells in top left and right quadrants (LIVE/DEAD⁺), corresponding to non-viable cells. Data are the mean±SEM from 3 independent experiments. *p<0.05, ***p<0.001, ****p<0.0001, ANOVA with Sidak's post-test.

[0031] FIGS. 8A-8H: KitStop ESO reduces wild-type Kit expression in mouse mast cells in vitro and in vivo. (FIG. 8A) RT-PCR demonstrating splice-switching of wild-type c-Kit in bone marrow-derived mast cells (BMMCs) by mouse KitStop ESO in comparison to standard control ASO (Stndcon). Black arrow=full-length c-Kit, gray arrow=alternatively spliced c-Kit. (FIG. 8B) Flow cytometry histogram of surface wild-type Kit expression in BMMCs following transfection with KitStop ESO. Data are representative of 3 independent experiments on separate mice. (FIG. 8C) Mean flow cytometry data for surface Kit expression calculated from the geometric MFI and expressed as a percentage of Stndcon ASO. Data are the mean±SEM from 3 independent experiments on separate mice. *p<0.01, paired t-test. (FIG. 8D) Timeline for intraperitoneal delivery of KitStop Vivo Morpholinos. (FIG. 8E) RT-PCR for c-Kit expression, with evidence of splice switching, in cells collected by peritoneal lavage. Black arrow=full-length c-Kit, gray arrow=alternatively spliced c-Kit. (FIG. 8F) Representative flow cytometry density plots of peritoneal cells harvested from mice treated with Stndcon ASO (FIG. 8F), or KitStop ESO (FIG. 8G) Vivo Morpholinos. (FIG. 8H) Percentage of mast cells, identified as Kit and FcεRI double positive cells (top right quadrant in FIG. 8F and FIG. 8G), harvested by peritoneal lavage following treatment with Stndcon ASO or KitStop ESO Vivo Morpholinos. Each datapoint represent a different mouse and data are combined from two independent experiments (p value from unpaired t-test). I: isotype; S: Stndcon; K: KitStop.

[0032] FIGS. 9A-9E: KitStop ESO reduces mouse skin mast cell numbers in vivo. (FIG. 9A) Timeline for skin injection of KitStop Vivo Morpholinos. (FIG. 9B) In representative sections from standard control ASO (Stndcon) and KitStop ESO treatment groups, mast cells were easily identified due to the presence of positive-staining metachromatic granules, which give a deep violet hue (see red arrow heads). (FIG. 9C) Skin histology with hematoxylin and eosin staining from Stndcon ASO and KitStop ESO treated mice displayed normal morphology with no evidence of pathology. (FIG. 9D) Plot of dermal mast cell number per mm² from toluidine blue stained skin sections taken from Stndcon ASO or KitStop ESO treated skin. (FIG. 9E) Plot of mast cell number per mm² from the full thickness skin sections, including dermis and panniculus adiposus surrounding adnexal structures. Each dot represents the average mast cell number per entire specimen. P values are from an unpaired t-test.

[0033] FIGS. 10A-10G. Systemic delivery of KitStop ESO inhibits tumor growth in a humanized xenograft mast cell neoplasia model. (FIG. 10A) Schematic representation of the protocol for the xenograft model used. (FIG. 10B) Measurements of tumor volume over time during treatment. Arrows indicate days that KitStop or vehicle control was administered. (FIG. 10C) Weight of excised tumors after mice were euthanized on day 14. (FIG. 10D) Photograph of tumors after mice were euthanized at day 14. Measurements are in centimeters. (FIG. 10E) Spleen weight at the conclusion of the experiment. (FIG. 10F) Liver weight at the conclusion of the experiment. (FIG. 10G) Mice weight was monitored over the course of the experiment. No significant differences were observed over the course of the experiment. Data are the mean±SEM from 5 mice per group. *p<0.05, **p<0.01, ***p<0.001. ANOVA with Dunnett's post-test (FIG. 10B) or unpaired t-test (FIGS. 10C and 10E).

### BRIEF DESCRIPTION OF THE SEQUENCE LISTING

[0034] SEQ ID NO: 1 is the nucleotide sequence of a KitStop ESO designed to target exon 4 of an exemplary human c-Kit gene product (Accession No. NM 000222.2 of the GENBANK® biosequence database) wherein a region within the splicing donor site was targeted. SEQ ID NO: 1 is designed to hybridize specifically to the 3′ six nucleotides of exon 4 of the human KIT gene product represented by Accession No. NM_000222.2 of the GENBANK® biosequence database and the 19 nucleotides in the downstream intron. As such, SEQ ID NO: 1 corresponds to the reverse complement of nucleotides 41,835-41,859 of SEQ ID NO: 18.

[0035] SEQ ID NO: 2 is the nucleotide sequence of an ESO for an exemplary murine c-kit gene product (Accession No. NM_001122733.1 of the GENBANK® biosequence database). SEQ ID NO: 2 is designed to hybridize specifically to the 3 six nucleotides of exon 4 of the Mus musculus Kit gene product represented by Accession No. NM_001122733.1 of the GENBANK® biosequence database and the 19 nucleotides in the downstream intron. As such, SEQ ID NO: 2 corresponds to the reverse complement of nucleotides 35,953-35,977 of SEQ ID NO: 19.

[0036] SEQ ID NO: 3 is the nucleotide sequence of a standard control ASO has identical chemistry to the KitStop ESO but it does not induce exon skipping of any known gene.

[0037] SEQ ID NOs: 4 and 5 are the nucleotide sequences of forward and reverse primers that can be used together to amplify exon 4 of human c-KIT mRNA.

[0038] SEQ ID NOs: 6 and 7 are the nucleotide sequences of forward and reverse primers that can be used together to amplify exon 4 of mouse c-kit mRNA.

[0039] SEQ ID NOs: 8 and 9 are nucleotide and amino acid sequences, respectively, of exemplary human c-KIT gene products. The nucleotide sequence corresponds to Accession No. NM 000222.2 in the GENBANK® biosequence database, and the amino acid sequence corresponds to Accession No. NP_000213.1 in the GENBANK® biosequence database. The transmembrane domain of the exemplary human c-KIT gene product corresponds to amino acids 525-545 of SEQ ID NO: 9 and is encoded within exon 10. Any truncation prior to this should result in some embodiments in a defective protein and in some embodiments, should result is a failure of the protein to be produced and/or to localize to the cell membrane.

[0040] SEQ ID NOs: 10 and 11 are nucleotide and amino acid sequences, respectively, of exemplary murine c-kit gene products. The nucleotide sequence corresponds to Accession No. NM_001122733.1 in the GENBANK® biosequence database, and the amino acid sequence corresponds to Accession No. NP_001116205.1 in the GENBANK® biosequence database.

[0041] SEQ ID NOs: 12 and 13 are nucleotide and amino acid sequences, respectively, of exemplary feline c-kit gene products. The nucleotide sequence corresponds to Accession No. NM_001009837.3 in the GENBANK® biosequence database, and the amino acid sequence corresponds to Accession No. NP_001009837.3 in the GENBANK® biosequence database.

[0042] SEQ ID NOs: 14 and 15 are nucleotide and amino acid sequences, respectively, of exemplary canine c-kit gene products. The nucleotide sequence corresponds to Accession No. NM_001003181.1 in the GENBANK® biosequence database, and the amino acid sequence corresponds to Accession No. NP_001003181.1 in the GENBANK® biosequence database.

[0043] SEQ ID NOs: 16 and 17 are nucleotide and amino acid sequences, respectively, of exemplary equine c-kit gene products. The nucleotide sequence corresponds to Accession No. NM_001163866.2 in the GENBANK® biosequence database, and the amino acid sequence corresponds to Accession No. NP_001157338.2 in the GENBANK® biosequence database.

[0044] SEQ ID NO: 18 is an exemplary genomic sequence of the human c-KIT locus. It corresponds to nucleotides 54,657,928-54,740,715 of Accession No. NC 000004.12 in the GENBANK® biosequence database.

[0045] SEQ ID NO: 19 is an exemplary genomic sequence of the murine c-kit locus. It corresponds to nucleotides 75,574,987-75,656,745 of Accession No. NC 000071.6 in the GENBANK® biosequence database.

[0046] SEQ ID NO: 20 is an exemplary genomic sequence of the feline c-kit locus. It corresponds to the reverse complement of nucleotides 163,952,966-164,039,337 of Accession No. NC 018726.3 in the GENBANK® biosequence database.

[0047] SEQ ID NO: 21 is an exemplary genomic sequence of the canine c-kit locus. It corresponds to nucleotides 47,108,504-47,190,020 of Accession No. NC 006595.3 in the GENBANK® biosequence database.

[0048] SEQ ID NO: 22 is an exemplary genomic sequence of the equine c-kit locus. It corresponds to the reverse complement of nucleotides 79,538,697-79,618,653 of Accession No. NC 009146.3 in the GENBANK® biosequence database.

[0049] SEQ ID NOs: 23-60 are target nucleotide sequences for additional exemplary ESOs that are designed to target one of exons 2-20 of an exemplary human c-KIT gene product (Accession No. NM_000222.2 of the GENBANK® biosequence database) wherein a region that includes a splice donor site or a splice acceptor site can be targeted. See Table 3. Particularly, SEQ ID NOs: 23 and 24 can be employed to skip exon 2, resulting in an in frame deleted nucleotide sequence encoding SEQ ID NO: 61; SEQ ID NOs: 25 and 26 can be employed to skip exon 3, resulting in an in frame deleted nucleotide sequence encoding SEQ ID NO: 62; SEQ ID NOs: 27 and 28 can be employed to skip exon 4, resulting in a frame shifted nucleotide sequence encoding SEQ ID NO: 63; SEQ ID NOs: 29 and 30 can be employed to skip exon 5, resulting in a frame shifted nucleotide sequence encoding SEQ ID NO: 64; SEQ ID NOs: 31 and 32 can be employed to skip exon 6, resulting in a frame shifted nucleotide sequence encoding SEQ ID NO: 65; SEQ ID NOs: 33 and 34 can be employed to skip exon 7, resulting in a frame shifted nucleotide sequence encoding SEQ ID NO: 66; SEQ ID NOs: 35 and 36 can be employed to skip exon 8, resulting in a frame shifted nucleotide sequence encoding SEQ ID NO: 67; SEQ ID NOs: 37 and 38 can be employed to skip exon 9, resulting in a frame shifted nucleotide sequence encoding SEQ ID NO: 68; SEQ ID NOs: 39 and 40 can be employed to skip exon 10, resulting in a frame shifted nucleotide sequence encoding SEQ ID NO: 69, which since exon 10 encodes the transmembrane domain can in some embodiments create a soluble receptor that is incapable of signaling; SEQ ID NOs: 41 and 42 can be employed to skip exon 11, resulting in a frame shifted nucleotide sequence encoding SEQ ID NO: 70, which since exon 11 encodes amino acids just C-terminal to the transmembrane domain, can in some embodiments create a kinase dead, dominant negative protein; SEQ ID NOs: 43 and 44 can be employed to skip exon 12, resulting in an in frame deleted nucleotide sequence encoding SEQ ID NO: 71; SEQ ID NOs: 45 and 46 can be employed to skip exon 13, resulting in an in frame deleted nucleotide sequence encoding SEQ ID NO: 72; SEQ ID NOs: 47 and 48 can be employed to skip exon 14, resulting in a frame shifted nucleotide sequence encoding SEQ ID NO: 73; SEQ ID NOs: 49 and 50 can be employed to skip exon 15, resulting in a frame shifted nucleotide sequence encoding SEQ ID NO: 74; SEQ ID NOs: 51 and 52 can be employed to skip exon 16, resulting in a frame shifted nucleotide sequence encoding SEQ ID NO: 75; SEQ ID NOs: 53 and 54 can be employed to skip exon 17, resulting in an in frame deleted nucleotide sequence encoding SEQ ID NO: 76; SEQ ID NOs: 55 and 56 can be employed to skip exon 18, resulting in a frame shifted nucleotide sequence encoding SEQ ID NO: 77; SEQ ID NOs: 57 and 58 can be employed to skip exon 19, resulting in a frame shifted nucleotide sequence encoding SEQ ID NO: 78; and SEQ ID NOs: 59 and 60 can be employed to skip exon 20, resulting in a frame shifted nucleotide sequence encoding SEQ ID NO: 79.

[0050] SEQ ID NOs: 61-79 are the amino acid sequences of human KIT polypeptides that would result from exon skipping using the ESOs of SEQ ID NOs: 23-60. Particularly, SEQ ID NO: 61 is the predicted amino acid sequence of an exon 2 skipped protein, SEQ ID NO: 62 is the predicted amino acid sequence of an exon 3 skipped protein, SEQ ID NO: 63 is the predicted amino acid sequence of a severely truncated exon 4 skipped protein, SEQ ID NO: 64 is the predicted amino acid sequence of a severely truncated exon 5 skipped protein, SEQ ID NO: 65 is the predicted amino acid sequence of a severely truncated exon 6 skipped protein, SEQ ID NO: 66 is the predicted amino acid sequence of a severely truncated exon 7 skipped protein, SEQ ID NO: 67 is the predicted amino acid sequence of a severely truncated exon 8 skipped protein, SEQ ID NO: 68 is the predicted amino acid sequence of a severely truncated exon 9 skipped protein, SEQ ID NO: 69 is the predicted amino acid sequence of a severely truncated exon 10 skipped protein, SEQ ID NO: 70 is the predicted amino acid sequence of a severely truncated exon 11 skipped protein, SEQ ID NO: 71 is the predicted amino acid sequence of an exon 12 skipped protein, SEQ ID NO: 72 is the predicted amino acid sequence of an exon 13 skipped protein, SEQ ID NO: 73 is the predicted amino acid sequence of an exon 14 skipped protein, SEQ ID NO: 74 is the predicted amino acid sequence of an exon 15 skipped protein, SEQ ID NO: 75 is the predicted amino acid sequence of an exon 16 skipped protein, SEQ ID NO: 76 is the predicted amino acid sequence of an exon 17 skipped protein, SEQ ID NO: 77 is the predicted amino acid sequence of an exon 18 skipped protein, SEQ ID NO: 78 is the predicted amino acid sequence of an exon 19 skipped protein, and SEQ ID NO: 79 is the predicted amino acid sequence of an exon 20 skipped protein.

### DETAILED DESCRIPTION

[0051] Activating mutations in the proto-oncogene c-kit are associated with malignancies including systemic mastocytosis and mast cell (MC) leukemia. c-kit encodes Kit (CD117; mast/stem cell growth factor receptor (SCFR)), a receptor tyrosine kinase that plays a role in MC proliferation and is required for MC survival. Therefore, therapies blocking Kit signaling are a leading strategy to treat MC proliferative disorders.

[0052] However, despite some success, current therapies have off-target effects and, in some patients, complete remission or improved survival time cannot be achieved. This is due, in part, to c-kit mutations that confer resistance to tyrosine kinase inhibitors. Disclosed herein in some embodiments of the presently disclosed subject matter are innovative approaches to specifically target Kit expression with exon skipping oligonucleotides (ESOs) that introduce frameshifts into mature mRNA of either wild-type or mutant c-kit resulting in downregulation of Kit expression, inhibition of neoplastic MC proliferation, and induction of MC apoptosis. In addition, ESO administration depletes tissue MCs in vivo demonstrating therapeutic potential.

[0053] The therapeutic potential of ESOs has been significantly enhanced by chemical modifications that improve stability and bioavailability. Currently, ESOs have clear clinical applications in genetic diseases resulting from loss-of-function frameshift mutations, such as Duchenne muscular dystrophy, where ESOs restore the reading frame of the mature mRNA transcript, resulting in translation of an alternatively spliced, but partially functional protein. In some embodiments, the presently disclosed subject matter provides an ESO that achieves the opposite, and disrupts the open reading frame of an oncogenic transcript resulting in a loss-of-function frameshift in mature mRNA. In some embodiments of the presently disclosed subject matter, targeting Kit resulted in rapid and efficient MC death and reduction of MC numbers in vivo, demonstrating a Kit-targeted therapeutic to address the unmet clinical need for Kit-associated malignancies.

### I. Definitions

[0054] All technical and scientific terms used herein, unless otherwise defined below, are intended to have the same meaning as commonly understood by one of ordinary skill in the art. References to techniques employed herein are intended to refer to the techniques as commonly understood in the art, including variations on those techniques or substitutions of equivalent techniques that would be apparent to one of skill in the art. While the following terms are believed to be well understood by one of ordinary skill in the art, the following definitions are set forth to facilitate explanation of the presently disclosed subject matter.

[0055] While the following terms are believed to be well understood by one of ordinary skill in the art, the following definitions are set forth to facilitate explanation of the presently disclosed subject matter.

[0056] As used herein and in the appended claims, the singular forms “a”, “an”, and “the” include plural referents unless the context clearly dictates otherwise. For example, a nucleic acid molecule refers to one or more nucleic acid molecules. As such, the terms “a”, “an”, “one or more”, and “at least one” can be used interchangeably. Similarly, the terms “comprising”, “including”, and “having” can be used interchangeably. It is further noted that the claims may be drafted to exclude any optional element. As such, this statement is intended to serve as antecedent basis for use of such exclusive terminology as “solely”, “only”, and the like, in connection with the recitation of claim elements, or use of a “negative” limitation.

[0057] Ranges can be expressed herein as from “about” one particular value, and/or to “about” another particular value. When such a range is expressed, some embodiments includes from the one particular value and/or to the other particular value. Similarly, when values are expressed as approximations, by use of the antecedent “about”, it will be understood that the particular value forms an embodiment. It will be further understood that the endpoints of each of the ranges are significant both in relation to the other endpoint, and independently of the other endpoint. It is also understood that there are a number of values disclosed herein, and that each value is also herein disclosed as “about” that particular value in addition to the value itself. For example, if the value “10” is disclosed, then “about 10” is also disclosed. It is also understood that when a value is disclosed that “less than or equal to” the value, “greater than or equal to the value” and possible ranges between values are also disclosed, as appropriately understood by the skilled artisan. For example, if the value “10” is disclosed, then “less than or equal to 10” as well as “greater than or equal to 10” are also disclosed. It is also understood that the throughout the application, data are provided in a number of different formats, and that these data represent in some embodiments endpoints and starting points and in some embodiments ranges for any combination of the data points. For example, if a particular data point “10” and a particular data point “15” are disclosed, it is understood that greater than, greater than or equal to, less than, less than or equal to, and equal to 10 and 15 are considered disclosed as well as between 10 and 15. It is also understood that each unit between two particular units are also disclosed. For example, if 10 and 15 are disclosed, then 11, 12, 13, and 14 are also disclosed.

[0058] The term “and/or”, when used in the context of a list of entities, refers to the entities being present singly or in combination.

[0059] The terms “optional” and “optionally” as used herein indicate that the subsequently described event, circumstance, element, and/or method step may or may not occur and/or be present, and that the description includes instances where said event, circumstance, element, or method step occurs and/or is present as well as instances where it does not.

[0060] Before the present compounds, compositions, articles, devices, and/or methods are disclosed and described, it is to be understood that they are not limited to specific synthetic methods or specific recombinant biotechnology methods unless otherwise specified, or to particular reagents unless otherwise specified, as such may, of course, vary. It is also to be understood that the terminology used herein is for the purpose of describing particular embodiments only and is not intended to be limiting.

### II. General Considerations

[0061] Human malignancies associated with activating c-KIT mutations include mast cell proliferative disorders, gastrointestinal stromal tumors (GISTs), and less commonly, melanoma and acute myeloid leukemia (AML). Increased expression of normal c-KIT may also contribute to tumorigenesis in solid lung cancers from small lung cells that do not normally express KIT and are exposed to environments rich in SCF. GISTs are believed to derive from interstitial cells of Cajal and in up to 80% of sporadic GISTs, at least 17 different activating mutations involving exons 8, 11, 13, or 17 of c-Kit have been reported. Similarly, approximately 90% of adults with diseases of abnormal mast cell proliferation (mastocytosis) have at least a point mutation consisting of a substitution of aspartic acid to valine in the catalytic domain of c-KIT (D816V), rendering it constitutively active, and/or other mutations in c-KIT.

[0062] Therefore, therapies blocking KIT activity are the main approaches to treat these patient populations and they have been somewhat successful in the treatment of some of these malignancies alone or in combination, but not in others where complete remissions or improved survival time is rare. The success of therapy is linked to the type of mutation and/or the presence of additional mutations in c-KIT or other proto-oncogenes. Pharmacological targeting of KIT catalytic activity has been a major strategy for blocking KIT-mediated responses. A limiting factor in the treatment of KIT-related malignancies has to been that inhibitors targeting the inactive ATP-binding site conformation of KIT, such as imatinib mesylate (imatinib, STI571, Gleevec, or Glivec) and its derivatives (nilotinib (AMN107) and PD180970), are unsuccessful in inhibiting the active, extended conformation of KIT. Therefore, mutations that stabilize the active conformation (mostly kinase domain mutations, including the common D816V mutation), as those found in most aggressive mastocytosis patients, are resistant to this drug. An additional drawback of imatinib has been the incidence in some patients of secondary resistance to the drug, apparently due in part to the acquisition (or enrichment) of other mutations in the kinase domain of the receptor that are insensitive to imatinib. Therefore, patients may initially respond to imatinib that eliminates the imatinib sensitive cells, but may have a reoccurrence of imatinib-resistant clonal expansions.

[0063] KIT-associated neoplastic diseases are often treated by drugs that are in no way specific and thus have many off-target effects. Imatinib is the drug of choice because it is more specific to KIT signaling than other drugs as it fits into the kinase pocket of KIT. However, many patients, particularly those with the most severe disease, are resistant to imatinib and more general inhibitors are used that have wide-ranging and often severe side effects. In some embodiments, the presently disclosed subject matter is targeted to KIT and thus off-target effects are minimal compared to existing kinase inhibitors that are commonly used.

[0064] Other compounds, including dasatinib (BMS-354825), have been found to target the catalytic activity associated with D816V and other KD mutations. Dasatinib was reported to inhibit Kit autophosphorylation and the growth of both human mast cell line (HMC)-1.1 and HMC-1.2 human mast cell lines, which express the V560G mutation or the V560G and D816V mutations, respectively. The HMC1.2 mast cell line therefore harbors the mutation in the kinase domain that confers resistance to imatinib and other inhibitors. Dasatinib and derivatives, however, have wider specificity and affect multiple kinases such as Src Kinases, Tec kinases, Bruton's tyrosine kinase (Btk), mitogen-activated protein kinases and AKT as well as other receptor kinases that are important for growth and other functions in mast cells and other cell types. Thus, while being potentially more effective by acting on various pathways, their distinct side effects should also be taken into consideration depending on the patient.

[0065] The presently disclosed subject matter provides a treatment for Kit-mediated responses that eliminates expression of Kit in mast cells, leading to loss of proliferation, induction of apoptosis, and rapid cell death of transformed HMC1.2 mast cell leukemia cells that harbor the V560G and D816V mutations. These cells are used to test new drugs for mastocytosis and they are resistant to many kinase inhibitors due to the conformation of the constitutively active Kit that they express. The presently disclosed subject matter kills these cells within hours and it is predicted that it will effectively kill cells that harbor any activating Kit mutation. In some embodiments, the presently disclosed subject matter utilizes chemically stable splice switching oligonucleotides to alter the splicing of Kit pre-mRNA that induces exon skipping of exon 4 (a very early exon in the mRNA) to introduce a frame-shift in the open reading frame that results in an immediate STOP codon and thus eliminates receptor expression.

[0066] The presently disclosed subject matter can be utilized in Kit-associated cancer and neoplastic diseases, and also has applications in mast cell-associated diseases since administering the drug specifically depletes mast cells in tissue. Depleting mast cells can relieve allergy-like symptoms that are driven by mast cells that may be hyperresponsive. Also, mast cell numbers are increased in tissues of allergic patients and administration can deplete these cells. Kit expression outside of the bone marrow is restricted to a few cell types and thus, the presently disclosed subject matter is targeted. Mast cell depletion in tissue can also be utilized as a research tool where studies of mast cell function are enabled if comparisons between tissue containing mast cells can be compared to tissue that is mast cell deficient. Kit deficient mice have been used for these studies, but these mice have other immune issues associated with functions for Kit in the bone marrow. Finally, the presently disclosed subject matter provides for the treatment of mast cell tumors, which are the most common tumor in dogs (and to some degree cats also). The presently disclosed subject matter can be used to kill mast cell tumor cells, given its high potency in human mast cell leukemia cells.

### III. Oligonucleotides and Related Methods

[0067] Antisense technology has been demonstrated to be an effective method of modifying the expression levels of gene products (see for example, U.S. Pat. Nos. 8,765,703, 8,946,183, and U.S. Patent Publication No. 2015/0376615, which are incorporated herein by reference in their entirety). Antisense technology works by interfering with known steps in the normal processing of mRNA. Briefly, RNA molecules are transcribed from genomic DNA in the nucleus of the cell. These newly synthesized mRNA molecules, called primary mRNA or pre-mRNA, must be processed prior to transport to the cytoplasm for translation into protein at the ribosome. Such processing includes the addition of a 5′ methylated cap and the addition of a poly(A) tail to the 3′ end of the mRNA.

[0068] Maturation of 90-95% of mammalian mRNAs then occurs with splicing of the mRNA. Introns (or intervening sequences) are regions of a primary transcript (or the DNA encoding it) that are not included in the coding sequence of the mature mRNA. Exons (expressed sequences) are regions of a primary transcript (or the DNA encoding it) that remain in the mature mRNA when it reaches the cytoplasm. During the splicing process, exons in the pre-mRNA molecule are spliced together to form the mature mRNA sequence. Splice junctions, also referred to as splice sites, are utilized by cellular apparatus to determine which sequences are removed and where the ends to be joined start and stop.

[0069] Sequences on the 5′ side of the junction are called the 5′ splice site, or splice donor site, whereas sequences on the 3′ side the junction are referred to as the 3′ splice site, or the splice acceptor site. In splicing, the 3′ end of an upstream exon is joined to the 5′ end of the downstream ex on. Thus, the un-spliced RNA (or pre-mRNA) has an exon/intron junction at the 5′ end of an intron and an intron/exon junction at the 3′ end of an intron. After the intron is removed, the exons are contiguous at what is sometimes referred to as the exon/exon junction or boundary in the mature mRNA. Cryptic splice sites are those which are less often used but may be used when the usual splice site is blocked or unavailable. The use of different combinations of exons by the cell can result in multiple mRNA transcripts from a single gene.

[0070] In one application of antisense technology, an antisense oligonucleotide (AON) binds to a mRNA molecule transcribed from a gene of interest and inactivates (“turns off”) the mRNA by increasing its degradation and/or by preventing translation or translocation of the mRNA by steric hindrance. The end result is that expression of the corresponding gene (i.e., final production of the protein encoded by the corresponding gene) is reduced or eliminated. Alternatively, antisense technology can be used to affect splicing of a gene transcript. In this application, the antisense oligonucleotide binds to a pre-spliced RNA molecule (pre-messenger RNA or pre-mRNA) and re-directs the cellular splicing apparatus, thereby resulting in modification of the exon content of the spliced mRNA molecule. Thus, the overall sequence of a protein encoded by the modified mRNA differs from a protein translated from mRNA, the splicing of which was not altered (i.e., the full length, wild-type protein). The protein that is translated from the altered mRNA may be truncated and/or it may be missing critical sequences required for proper function. Typically, the compounds used to affect splicing are, or contain, oligonucleotides having a base sequence complementary to the mRNA being targeted. Such oligonucleotides are referred to herein as “antisense oligonucleotides” (AONs).

[0071] This disclosure provides antisense technology to modulate splicing of pre-mRNAs encoding a Kit protein, thereby causing a decrease in the amount or “level” of Kit protein expressed by a cell. Accordingly, a method of this disclosure can generally be accomplished by contacting a cell expressing a Kit transcript, with an antisense oligomer targeted to a region of the Kit pre-mRNA. Such contact results in uptake of the antisense oligomer by the cell, hybridization of the oligomer to the Kit mRNA, and subsequent modulation of splicing of the Kit pre-mRNA. In some embodiments of the presently disclosed methods, such modulation of splicing of the Kit mRNA decreases expression of Kit. The presently disclosed subject matter is not limited to the particular embodiments described herein, as such may vary. Additionally, the terminology used herein is for the purpose of describing particular embodiments only, and is not intended to be limiting on the presently disclosed subject matter.

[0072] As used herein, the term “Kit” refers to genetic loci that encode a mast/stem cell growth factor receptor (SCFR), also known as proto-oncogene c-Kit, tyrosine-protein kinase Kit, and CD117, in an animal (e.g., a mammal). The Kit protein is a receptor tyrosine kinase. Kit genes and gene products have been identified in many species, and in any given species there are generally several different gene products (e.g., RNAs) that are encoded by the Kit locus. An exemplary, non-limiting summary of Kit gene products present in the GENBANK® biosequence database is provided in Table 1.

[0073] It is understood that Table 1 includes the Accession Nos. for only certain exemplary Kit gene products in the GENBANK® biosequence database, and that other species also encode and express Kit gene products, all of which are encompassed within the scope of the presently disclosed subject matter. It is further understood that the listed species and other species can have additional Kit gene products not explicitly listed, and that all of these additional Kit gene products are also within the scope of the presently disclosed subject matter. Thus, it is expressly stated that all Kit orthologs are included within the compositions and methods of the presently disclosed subject matter.

TABLE 1
Exemplary Kit Gene Products

| | | |
|---|---|---|
| Gene Product | Nucleotide | Protein |
| Name | Accession No. | Accession No. |

Homo sapiens

| | | |
|---|---|---|
| Isoform 1 precursor | NM_000222.2 | NP_000213.1 |
| Isoform 2 precursor | NM_001093772.1 | NP_001087241.1 |
| Isoform X1 | XM_005265740.1 | XP_005265797.1 |
| Isoform X2 | XM_005265741.1 | XP_005265798.1 |
| Isoform X3 | XM_017008178.1 | XP_016863667.1 |
| Isoform X4 | XM_005265742.3 | XP_005265799.1 |
| Isoform X5 | XM_017008179.1 | XP_016863668.1 |
| Isoform X6 | XM_017008180.1 | XP_016863669.1 |

Mus musculus

| | | |
|---|---|---|
| Isoform 1 precursor | NM_001122733.1 | NP_001116205.1 |
| Isoform 2 precursor | NM_021099.3 | NP_066922.2 |
| Isoform X1 | XM_017320687.1 | XP_017176176.1 |

Felis catus

| | | |
|---|---|---|
| Kit precursor | NM_001009837.3 | NP_001009837.3 |

Canis lupus familiaris

| | | |
|---|---|---|
| Kit precursor | NM_001003181.1 | NP_001003181.1 |
| Isoform X1 | XM_005627968.3 | XP_005628025.1 |
| Isoform X2 | XM_005627969.3 | XP_005628026.1 |
| Isoform X3 | XM_005627970.3 | XP_005628027.1 |

Equus caballus

| | | |
|---|---|---|
| Kit precursor | NM_001163866.2 | NP_001157338.2 |
| Isoform X1 | XM_014738507.2 | XP_014593993.2 |
| Isoform X2 | XM_005608574.3 | XP_005608631.2 |
| Isoform X3 | XM_005608573.3 | XP_005608630.2 |

Other Organisms

| | | |
|---|---|---|
| Pan paniscus isoform X1 | XM_008954177.1 | XP_008952425.1 |
| Gorilla gorilla gorilla isoform X1 | XM_019025974.1 | XP_018881519.1 |
| Macaca mulatta Kit precursor | NM_001266095.1 | NP_001253024.1 |
| Pongo abelii isoform X1 | XM_024246425.1 | XP_024102193.1 |
| Macaca fascicularis isoform X1 | XM_005555272.2 | XP_005555329.1 |
| Sus scrofa Kit precursor | NM_001044525.1 | NP_001037990.1 |
| Rattus norvegicus Kit precursor | NM_022264.1 | NP_071600.1 |
| Bos Taurus Kit precursor | NM_001166484.1 | NP_001159956.1 |
| Gallus gallus Kit precursor | NM_204361.1 | NP_989692.1 |
| Ovis aries Kit precursor | NM_001308594.1 | NP_001295523.1 |

[0074] Similarly, a Kit coding sequence refers to a nucleic acid sequence encoding at least a portion of a Kit protein. Such a portion can be a fragment of the protein (e.g., a 10, 20, 30, 40, 50, 60, 70, 80, 90, or 100 contiguous amino acid segment from any part of the whole protein), an exon, or a domain (e.g., a transmembrane domain), or it can refer to the entire protein, including any splicing variants. c-Kit genes or coding sequences of this disclosure can be from any mammal having such gene or coding sequence. By way of example and not limitation, the c-Kit gene, coding sequence, and/or gene product may be from a human, a mouse, a canine, a feline, an equine, or another mammal. As used herein, a c-Kit transcript is an RNA molecule transcribed from a c-Kit genetic locus. In some embodiments, c-Kit transcripts targeted by oligomers of this disclosure are primary transcripts or pre-mRNA molecules. As used herein, primary mRNA or pre-mRNA is an mRNA transcript that has not yet undergone splicing. Accordingly, a mature mRNA molecule is an mRNA molecule that has undergone splicing.

[0075] As used herein, the term antisense oligomer refers to a polymeric molecule comprising nucleobases, which is capable of hybridizing to a sequence in a nucleic acid molecule, such as an mRNA molecule. The term nucleobase, as used herein, refers to the heterocyclic base portion of a nucleoside. In general, a nucleobase is any group that contains one or more atoms, or groups of atoms, capable of hydrogen bonding to a base of another nucleoside. In addition to “unmodified” or “natural” nucleobases such as the purine nucleobases adenine (A) and guanine (G), and the pyrimidine nucleobases thymine (T), cytosine (C) and uracil (U), modified nucleobases or nucleobase mimetics known to those skilled in the art are also amenable to this disclosure. The term “modified nucleobase” refers to a nucleobase that is similar in structure to the parent nucleobase, such as for example, a 7-deaza purine, a 5-methyl cytosine, a G-clamp, or a tricyclic phenoxazine nucleobase mimetic. Methods for preparation of these modified nucleobases are known to those skilled in the art. As is known in the art, a nucleoside is a base-sugar combination. The base portion of the nucleoside is normally a heterocyclic base (e.g., a nucleobase or simply a “base”). The two most common classes of such heterocyclic bases are purines and the pyrimidines. Nucleotides are nucleosides that further include a phosphate group covalently linked to the sugar portion of the nucleoside. For those nucleosides that include a pentofuranosyl sugar, the phosphate group can be linked to the 2′, 3′ or 5′ hydroxyl moiety of the sugar. In forming oligonucleotides, the phosphate groups covalently link adjacent nucleosides to one another to form a linear polymeric compound. Within oligonucleotides, the phosphate groups are commonly referred to as forming the internucleoside backbone of the oligonucleotide. The normal linkage or backbone of RNA and DNA is a 3′ to 5′ phosphodiester linkage.

[0076] It is understood in the art that RNA molecules often have a short half-life, making their use as therapeutic agents problematic. Thus, chemical modifications in oligonucleotides are often included to alter their activity. Chemical modifications can alter oligomer activity by, for example, increasing affinity of an antisense oligomer for its target RNA, increasing nuclease resistance (e.g., resistance to ribonucleases such as RNaseH), and/or altering the pharmacokinetics (e.g. half-life) of the oligomer. For example, it is possible to replace sugars, nucleobases and/or internucleoside linkages with a group that maintains the ability of the oligomer to hybridize to its target sequence, but which imparts a desirable characteristic to the oligomer (e.g., resistance to degradation, increased half-life, etc.). Such groups can be referred to as analogs (e.g., sugar analog, nucleobase analog, etc.). Generally, an analog is used in place of the sugar or sugar-internucleoside linkage combination, and the nucleobase is maintained for hybridization to a selected target. Representative examples of a sugar mimetic include, but are not limited to, cyclohexenyl or morpholino. Representative examples of a mimetic for a sugar-internucleotide linkage combination include, but are not limited to, peptide nucleic acids (PNA) and morpholino groups linked by uncharged, achiral linkages. In some instances, an analog is used in place of the nucleobase. Representative nucleobase mimetics are well known in the art and include, but are not limited to, tricyclic phenoxazine analogs and universal bases (see e.g., Berger et al., 2000, incorporated herein by reference). Examples of such sugar, nucleotide, and nucleobase mimetics are disclosed in U.S. Pat. Nos. 8,765,703 and 8,946,183, which are incorporated herein by reference). Methods of synthesis of sugar, nucleotide, and nucleobase mimetics, and the use of such mimetics to produce oligonucleotides are well known to those skilled in the art.

[0077] The term “oligomer” includes oligonucleotides, oligonucleosides, oligonucleotide analogs, oligonucleotide mimetics and chimeric combinations thereof. Such molecules are generally known to those skilled in the art. Oligomers of this disclosure include, but are not limited to, primers, probes, antisense compounds, antisense oligonucleotides, external guide sequence (EGS) oligonucleotides, alternate splicers, and siRNAs. As such, these compounds can be introduced in the form of single-stranded, double-stranded, circular, branched or hairpins and can contain structural elements such as internal or terminal bulges or loops. Oligomers of this disclosure can be any length suitable for administering to a cell or individual in order to modulate splicing of an mRNA molecule. For example, antisense oligomers of this disclosure can comprise from about 10 to about 50 nucleobases (i.e., from about 10 to about 50 linked nucleosides). One having ordinary skill in the art will appreciate that this embodies antisense oligomers of 10, 11, 12, 13, 14, 15, 16, 17, 18, 19, 20, 21, 22, 23, 24, 25, 26, 27, 28, 29, 30, 31, 32, 33, 34, 35, 36, 37, 38, 39, 40, 41, 42, 43, 44, 45, 46, 47, 48, 49, or 50 nucleobases. In some embodiments, antisense oligomers of this disclosure can comprise, or consist of, 10 to 30 nucleobases, or 10 to 25 nucleobases. Methods of determining the appropriate length for antisense oligomers of this disclosure would be apparent to those skilled in the art upon a review of this disclosure.

[0078] As used herein, the terms “targeted to”, “targeting”, and the like refer to a process of designing an antisense oligomer so that it specifically hybridizes with a desired nucleic acid molecule, such as a desired mRNA molecule. The terms “hybridizes”, “hybridization”, “hybridize to”, and the like are terms of art, and refer to the pairing of nucleobases in complementary strands of oligonucleotides (e.g., an antisense oligomer and a target sequence in a mRNA molecule). While not limited to a particular mechanism, the most common mechanism of pairing involves hydrogen bonding, which may be Watson Crick, Hoogsteen or reversed Hoogsteen hydrogen bonding, between complementary nucleoside or nucleotide bases (nucleobases). For example, the natural base adenine is complementary to the natural nucleobases thymidine and uracil, which pair through the formation of hydrogen bonds. Similarly, the natural base guanine is complementary to the natural bases cytosine and 5-methyl cytosine. In the context of this disclosure, the phrase “specifically hybridizes” refers to the capacity of an antisense oligomer of this disclosure to preferentially bind an mRNA (e.g., pre-mRNA) encoding a Kit protein rather than binding an mRNA encoding a protein unrelated in structure to a Kit protein. Further, an antisense oligomer that preferentially binds a target sequence is one that hybridizes with an mRNA encoding a Kit protein (a Kit pre-mRNA), but which does not exhibit significant hybridization with mRNA molecules encoding proteins unrelated in structure to a Kit protein. In the context used herein, significant hybridization is, for example, binding of an oligomer of this disclosure to an mRNA encoding a protein unrelated in structure to a Kit protein, with an affinity or avidity sufficiently high enough to interfere with the ability of the antisense oligomer to achieve the desired effect. Examples of such desired effects include, but are not limited to, modulation of splicing of a Kit pre-mRNA, reduction in the level of expression of Kit protein, and a reduction or inhibition in Kit-related symptoms in an individual. Thus, upon a review of the instant disclosure, it will be understood by those skilled in the art that an antisense oligomer is considered specific for a target sequence (is specifically hybridizable, specifically hybridizes, etc.) when there is a sufficient degree of complementarity between the linear sequence of nucleobases in the antisense oligomer and a linear sequence of nucleobases in the target sequence, to avoid significant binding of the antisense oligomer to non-target nucleic acid sequences under conditions in which specific binding is desired (i.e., under physiological conditions in the case of in vivo assays or therapeutic treatment, and under conditions in which assays are performed in the case of in vitro assays).

[0079] As used herein, the terms “complement”, “complementary”, “complementarity”, and the like, refer to the capacity for precise pairing between nucleobases in an oligomer and nucleobases in a target sequence. Thus, if a nucleobase (e.g., adenine) at a certain position of an oligomer is capable of hydrogen bonding with a nucleobase (e.g., uracil) at a certain position in a target sequence in a target nucleic acid, then the position of hydrogen bonding between the oligomer and the target nucleic acid is considered to be a complementary position. Usually, the terms complement, complementary, complementarity, and the like, are viewed in the context of a comparison between a defined number of contiguous nucleotides in a first nucleic acid molecule (e.g., an oligomer) and a similar number of contiguous nucleotides in a second nucleic acid molecule (e.g., a mRNA molecule), rather than in a single base to base manner. For example, if an antisense oligomer is 25 nucleotides in length, its complementarity with a target sequence is usually determined by comparing the sequence of the entire oligomer, or a defined portion thereof, with a number of contiguous nucleotides in a mRNA molecule. An oligomer and a target sequence are complementary to each other when a sufficient number of corresponding positions in each molecule are occupied by nucleobases which can hydrogen bond with each other. Positions are corresponding when the bases occupying the positions are spatially arranged such that, if complementary, the bases form hydrogen bonds. As an example, when comparing the sequence of an oligomer to a similarly sized sequence in a target sequence, the first nucleotide in the oligomer is compared with a chosen nucleotide at the start of the target sequence. The second nucleotide in the oligomer (3′ to the first nucleotide) is then compared with the nucleotide 5 directly 3′ to the chosen start nucleotide. This process is then continued with each nucleotide along the length of the oligomer. Thus, the terms “specifically hybridizable” and “complementary” are terms which are used to indicate a sufficient degree of precise pairing or complementarity over a sufficient number of contiguous nucleobases such that stable and specific binding occurs between the antisense compound and a target nucleic acid.

[0080] Hybridization conditions under which a first nucleic acid molecule will specifically hybridize with a second nucleic acid molecule are commonly referred to in the art as stringent hybridization conditions. It is understood by those skilled in the art that stringent hybridization conditions are sequence-dependent and can be different in different circumstances. Thus, stringent conditions under which an oligomer of this disclosure specifically hybridizes to a target sequence are determined by the complementarity of the oligomer sequence and the target sequence and the nature of the assays in which they are being investigated. Persons skilled in the relevant art are capable of designing complementary sequences that specifically hybridize to a particular target sequence for a given assay or a given use.

[0081] The process of designing an antisense oligomer that is targeted to a nucleic acid molecule usually begins with identification of a target nucleic acid, the expression of which is to be modulated, and determining the sequence of the target nucleic acid molecule. As used herein, the terms “target nucleic acid”, “nucleic acid encoding a Kit protein”, and the like, encompass, for example, DNA encoding a Kit protein, RNA (including pre-mRNA and mRNA) transcribed from such DNA, and cDNA derived from such RNA For example, the target nucleic acid can be a cellular gene (or pre-mRNA or mRNA transcribed therefrom), the expression of which is associated with a particular disorder or disease state. Thus, in some embodiments, a useful target nucleic acid encodes a Kit protein. In some embodiments, the target nucleic acid is a c-Kit transcript. In some embodiments, the target nucleic acid is a c-Kit pre-mRNA. Once a target nucleic acid has been identified, the targeting process includes determining at least one target region in which the antisense interaction will occur, thereby modulating splicing of the target nucleic acid. As used herein, a target region is defined as a portion of the target nucleic acid having at least one identifiable structure, function, or characteristic. Exemplary target regions are those comprising sequences involved in splicing of pre-mRNA molecules. Examples of such identifiable structures, functions, or characteristics include, but are not limited to, at least a portion of an intron or exon, an intron/exon junction, a splice donor site, a splice acceptor site, a splice branch point or a splice enhancer site. Thus, in some embodiments, the target region comprises at least part of an intron or exon, a splice donor site, a splice acceptor site, a splice branch point, and/or a splice enhancer site. In some embodiments, the target region comprises at an intron or exon, a splice donor site, a splice acceptor site, a splice branch point, and/or a splice enhancer site.

[0082] Following identification of a target region, a target sequence within the target region can then be identified. As used herein, a target sequence is a nucleic acid sequence in a target region, to which an antisense oligomer of this disclosure specifically hybridizes. Exemplary target sequences are those involved in splicing of pre-mRNA. Once a target sequence has been identified, the antisense oligomer is designed to include a nucleobase sequence sufficiently complementary to the target sequence so that the antisense oligomer specifically hybridizes to the target nucleic acid. More specifically, the nucleotide sequence of the antisense oligomer is designed so that it contains a region of contiguous nucleotides sufficiently complementary to the target sequence so that the antisense oligomer specifically hybridizes to the target nucleic acid. Such a region of contiguous, complementary nucleotides in the oligomer can be referred to as an “antisense sequence” or a “targeting sequence.”

[0083] It is well known in the art that the greater the degree of complementarity between two nucleic acid sequences, the stronger and more specific is the hybridization interaction. It is also well understood that the strongest and most specific hybridization occurs between two nucleic acid molecules that are fully complementary. As used herein, the term fully complementary refers to a situation when each nucleobase in a nucleic acid sequence is capable of hydrogen binding with the nucleobase in the corresponding position in a second nucleic acid molecule. In some embodiments, the targeting sequence is fully complementary to the target sequence. In some embodiments, the targeting sequence comprises an at least 6 contiguous nucleobase region that is fully complementary to an at least 6 contiguous nucleobase region in the target sequence. In some embodiments, the targeting sequence comprises an at least 8 contiguous nucleobase sequence that is fully complementary to an at least 8 contiguous nucleobase sequence in the target sequence. In some embodiments, the targeting sequence comprises an at least 10 contiguous nucleobase sequence that is fully complementary to an at least 10 contiguous nucleobase sequence in the target sequence. In some embodiments, the targeting sequence comprises an at least 12 contiguous nucleobase sequence that is fully complementary to an at least 12 contiguous nucleobase sequence in the target sequence. In some embodiments, the targeting sequence comprises an at least 14 contiguous nucleobase sequence that is fully complementary to an at least 14 contiguous nucleobase sequence in the target sequence. In some embodiments, the targeting sequence comprises an at least 16 contiguous nucleobase sequence that is fully complementary to an at least 16 contiguous nucleobase sequence in the target sequence. In some embodiments, the targeting sequence comprises an at least 18 contiguous nucleobase sequence that is fully complementary to an at least 18 contiguous nucleobase sequence in the target sequence. In some embodiments, the targeting sequence comprises an at least 20 contiguous nucleobase sequence that is fully complementary to an at least 20 contiguous nucleobase sequence in the target sequence.

[0084] It will be understood by those skilled in the art that the targeting sequence may make up the entirety of an antisense oligomer of this disclosure, or it may make up just a portion of an antisense oligomer of this disclosure. For example, in an oligomer consisting 20 of 30 nucleotides, all 30 nucleotides can be complementary to a 30 contiguous nucleotide target sequence. Alternatively, for example, only 20 contiguous nucleotides in the oligomer may be complementary to a 20-contiguous nucleotide target sequence, with the remaining 10 nucleotides in the oligomer being mismatched to nucleotides outside of the target sequence. In some embodiments, oligomers of this disclosure have a targeting sequence of at least 10 nucleobases, at least 11 nucleobases, at least 12 nucleobases, at least 13 nucleobases, at least 14 nucleobases, at least 15 nucleobases, at least 16 nucleobases, at least 17 nucleobases, at least 18 nucleobases, at least 19 nucleobases, at least 20 nucleobases, at least 21 nucleobases, at least 22 nucleobases, at least 23 nucleobases, at least 24 nucleobases, at least 25 nucleobases, at least 26 nucleobases, at least 27 nucleobases, at least 28 nucleobases, at least 29 nucleobases, or at least 30 nucleobases in length.

[0085] It will be understood by those skilled in the art that the inclusion of mismatches between a targeting sequence and a target sequence is possible without eliminating the activity of the oligomer (e.g., modulation of splicing). Moreover, such mismatches can occur anywhere within the antisense interaction between the targeting sequence and the target sequence, so long as the antisense oligomer is capable of specifically hybridizing to the targeted nucleic acid molecule. Thus, antisense oligomers of this disclosure may comprise up to about 20% nucleotides that are mismatched, thereby disrupting base pairing of the antisense oligomer to a target sequence, as long as the antisense oligomer specifically hybridizes to the target sequence. In some embodiments, antisense oligomers comprise no more than 20%, no more than about 15%, no more than about 10%, no more than about 5% or not more than about 3% of mismatches, or less. In some embodiments, there are no mismatches between nucleotides in the antisense oligomer involved in pairing and a complementary target sequence. In some embodiments, mismatches do not occur at contiguous positions. For example, in an antisense oligomer containing 3 mismatch positions, in some embodiments the mismatched positions can be separated by runs (e.g., 3, 4, 5, etc.) of contiguous nucleotides that are complementary with 15 nucleotides in the target sequence.

[0086] The use of percent identity is a common way of defining the number of mismatches between two nucleic acid sequences. For example, two sequences having the same nucleobase pairing capacity would be considered 100% identical. Moreover, it should be understood that both uracil and thymidine will bind with adenine. Consequently, two molecules that are otherwise identical in sequence would be considered identical, even if one had uracil at position x and the other had a thymidine at corresponding position x. Percent identity may be calculated over the entire length of the oligomeric compound, or over just a portion of an oligomer. For example, the percent identity of a targeting sequence to a target sequence can be calculated to determine the capacity of an oligomer comprising the targeting sequence to bind to a nucleic acid molecule comprising the target sequence. In some embodiments, the targeting sequence is at least 80% identical, at least 85% identical, at least 90% identical, at least 95% identical, at least 97% identical, at least 98% identical or at least 99% identical over its entire length to a target sequence in a target nucleic acid molecule. In some embodiments, the targeting sequence is identical over its entire length to a target sequence in a target nucleic acid molecule. It is understood by those skilled in the art that an antisense oligomer need not be identical to the oligomer sequences disclosed herein to function similarly to the antisense oligomers described herein. Shortened versions of antisense oligomers taught herein, or non-identical versions of the antisense oligomers taught herein, fall within the scope of this disclosure. Non-identical versions are those wherein each base does not have 100% identity with the antisense oligomers disclosed herein. Alternatively, a non-identical version can include at least one base replaced with a different base with different pairing activity (e.g., G can be replaced by C, A, or T). Percent identity is calculated according to the number of bases that have identical base pairing corresponding to the oligomer to which it is being compared. The non-identical bases may be adjacent to each other, dispersed throughout the oligomer, or both. For example, a 16-mer having the same sequence as nucleobases 2-17 of a 20-mer is 80% identical to the 20-mer. Alternatively, a 20-mer containing four nucleobases not identical to the 20-mer is also 80% identical to the 20-mer. A 14-mer having the same sequence as nucleobases 1-14 of an 18-mer is 78% identical to the 18-mer. Such calculations are well within the ability of those skilled in the art. Thus, antisense oligomers of this disclosure comprise oligonucleotide sequences at least 80% identical, at least 85% identical, at least 90% identical, at least 92% identical, at least 94% identical at least 96% identical or at least 98% identical to sequences disclosed herein, as long as the antisense oligomers are able to modulate splicing of a desired mRNA molecule.

[0087] Antisense oligomers of this disclosure are capable of modulating splicing of mRNA molecules. As used herein, “modulation” of splicing refers to the ability of an antisense oligomer to affect the processing of a pre-mRNA transcript such that the resulting spliced mRNA molecule contains a desired combination of exons as a result of exon skipping (or exon inclusion), a deletion in one or more exons, or additional sequence not normally found in the spliced mRNA (e.g., intronic sequences). For example, modulation of splicing can refer to affecting the splicing of a Kit pre-mRNA such that the spliced mRNA (mature mRNA) is missing at least a portion, or the entirety, of one exon. In some embodiments, the spliced mRNA lacks at least a portion of exon 4. It can be the case that a truncated isoform of the Kit protein is present in cells, and that such truncation is due to a truncation in exon 4 of the mRNA encoding the Kit protein. Thus, for the purposes of describing this disclosure, splicing of a Kit pre-mRNA, due to the influence of an antisense oligomer, to produce a truncated mRNA encoding a truncated Kit protein, can be referred to as alternative splicing. Further, a Kit mRNA transcript lacking at least a portion, or the entirety, of exon 4, due to the influence of an antisense oligomer, is a product of alternative splicing. Thus, in the context of this disclosure, modulation of splicing can refer to inducing alternative splicing of a Kit pre-mRNA molecule, thereby reducing the level of mRNA molecules containing the entirely of exon 4, and increasing the level of mRNA molecules lacking at least a portion of exon 4.

[0088] Although the present disclosure exemplifies the compositions and methods with respect to targeting exon 4 of the human or murine Kit gene, it is understood that both other exons of the human or murine Kit gene could also be targeted in humans and mice. Additionally, exon 4 or any other exon could also be targeted in cats, dogs, horses, or other animals, and thus the particular examples of targeting strategies disclosed herein is understood to be exemplary only. A summary of the genomic organization of the Kit locus in particular exemplary animals is provided in Table 2.

TABLE 2
Genomic Organization of Kit Loci in Exemplary Animals

| | Genomic | |
|---|---|---|
| | Locus | |
| | SEQ ID | Nucleotide Positions of |
| Species | NO: | Exons in Genomic Locus |
| Homo | 18 | 1-154; 37585-37854; 40357-40638; |
| sapiens | | 41703-41839; 45797-45965; |
| | | 49171-49360; 51497-51612; 65657- |
| | | 65771; 67930-68123; 69291-69397; |
| | | 69489-69615; 69896-70000; |
| | | 70084-70194; 71408-71558; 73401- |
| | | 73492; 73944-74071; 75143-75265; |
| | | 78571-78682; 78794-78893; |
| | | 79248-79353; 80502-82788 |
| Mus | 19 | 1-132; 32040-32312; 34284-34565; |
| musculus | | 35821-35957; 40333-40507; |
| | | 45861-46050; 48003-48118; 62308- |
| | | 62422; 63979-64172; 65507-65613; |
| | | 65713-65839; 66124-66228; |
| | | 66341-66451; 70850-71000; 72762- |
| | | 72850; 73401-73528; 74561-74683; |
| | | 77564-77675; 77771-77870; |
| | | 78234-78339; 79428-81736 |
| Felis | 20 | Reverse complement of 1-1102; |
| catus | | 2207-2312; 2677-2776; 2888-2999; |
| | | 7017-7139; 8196-8323; 8814- |
| | | 8905; 10742-10892; 12058-12168; |
| | | 12258-12362; 12645-12771; |
| | | 12869-12975; 14198-14391; 15933- |
| | | 16047; 31125-31240; 33427-33616; |
| | | 38728-38899; 43910-44047; |
| | | 45147-45428; 48253-48522; 86237- |
| | | 86372 |
| Canis lupus | 21 | 1-101; 35944-36213; 38998-39279; |
| familiaris | | 40364-40500; 45080-45251; |
| | | 49157-49346; 52424-52539; 66555- |
| | | 66669; 68419-68612; 69809-69915; |
| | | 70009-70135; 70421-70525; |
| | | 70612-70722; 71913-72063; 73946- |
| | | 74037; 74515-74642; 75747-75869; |
| | | 79360-79471; 79585-79684; |
| | | 80038-80143; 81200-81517 |
| Equus | 22 | Reverse complement of 1-129; |
| caballus | | 1273-1378; 1734-1833; 1950-2061; |
| | | 5375-5497; 6550-6677; 7176- |
| | | 7267; 9440-9590; 10826-10936; |
| | | 11023-11127; 11397-11523; |
| | | 11617-11723; 13186-13367; 15056- |
| | | 15170; 28125-28240; 30357-30546; |
| | | 34989-35160; 39789-39925; |
| | | 41022-41303; 43889-44158; 79800- |
| | | 79957 |

[0089] With respect to Table 2, since the Table lists the positions of the exons in SEQ ID NOs: 18-22, it is understood that the nucleotides that fall between the listed positions are intron sequences. For example, the human c-KIT exon sequences are listed as corresponding to nucleotides 1-154, 37585-37854, 40357-40638, 41703-41839, 45797-45965, 49171-49360, 51497-51612, 65657-65771, 67930-68123, 69291-69397, 69489-69615, 69896-70000, 70084-70194, 71408-71558, 73401-73492, 73944-74071, 75143-75265, 78571-78682, 78794-78893, 79248-79353, and 80502-82788 of SEQ ID NO: 18. Since SEQ ID NO: 18 is a genomic sequence, it follows that the human c-KIT intron sequences correspond to nucleotides 155-37584, 37855-40356, 40639-41702, 41840-45796, 45966-49170, 49361-51496, 51613-65656, 65772-67929, 68124-69290, 69398-69488, 69616-69895, 70001-70083, 70195-71407, 71557-73400, 73493-73943, 74072-75142, 75266-78570, 78683-78793, 78894-79247, and 79354-80501 of SEQ ID NO: 18.

[0090] In designing an ESO, in some embodiments the ESO spans an exon/intron or intron/exon boundary, meaning that the ESO comprises contiguous nucleotides that are both 5′ and 3′ of a splice donor or a splice acceptor. The number of nucleotides of the ESO that are part of an exon and the number of nucleotides of the ESO that are part of the adjacent intron can vary, but in some embodiments, there are at least 5 exon nucleotides and at least 5 intron nucleotides. By way of example and not limitation, if the ESO is designed to have 25 nucleotides as in the cases of SEQ ID NOs: 1 and 2, in some embodiments the ESO includes 5, 6, 7, 8, 9, 10, 11 12, 13, 14, 15, 16, 17, 18, 19, or 20 contiguous exon nucleotides and also includes the directly adjacent 10, 19, 18, 17, 16, 15, 14, 13, 12, 11, 10, 9, 8, 7, 6, or 5 contiguous intron nucleotides, respectively. Stated another way, for any of SEQ ID NOs: 18-22, an ESO can comprise a sequence of in some embodiments 15, 16, 17, 18, 19, 20, 21, 22, 23, 24, 25, or more contiguous nucleotides of any of SEQ ID NOs: 18-22, which 15-25 or more contiguous nucleotides include at least one splice donor or splice acceptor sequence. Extensions of the sequences in the 5′ and/or 3′ directions can also occur such that ESOs can be designed to target pre-mRNA sequences of 26, 27, 28, 29, 30, 31, 32, 33, 34, 35, 36, 37, 38, 39, 40, 41, 42, 43, 44, 45, 46, 47, 48, 49, 50, or more nucleotides in length.

[0091] Exemplary target sequences that can be employed to design ESOs for use in targeting human c-KIT gene products are presented in Table 3. It is noted that target sequences that can be employed to design ESOs for use in targeting c-Kit gene products in non-human animals can be based on the approaches taken for the exemplary ESOs in Table 3.

TABLE 3
Exemplary Target Sequences for
Targeting Human c-KIT Gene Products

| Exon | | Donor Target Sequence* |
|---|---|---|
| 2 | Acceptor** | aacacgattctgtttttcttggcagGCTCTTCTCAACCATCTGTGAGTCC |
| | | (SEQ ID NO: 23; nucleotides 37560-37609 of SEQ ID NO: 18) |
| | Donor | AATTCCATTTATGTGTTTGTTAGAGgtaaatgcttggctttctgcagtgc |
| | | (SEQ ID NO: 24; nucleotides 37830-37879 of SEQ ID NO: 18) |
| 3 | Acceptor | actgattttggatatgcttctatagATCCTGCCAAGCTTTTCCTTGTTGA |
| | | (SEQ ID NO: 25; nucleotides 40332-40381 of SEQ ID NO: 18) |
| | Donor | AAATTCATCCTGAAAGTGAGGCCAGgtactggctctttcttatctgcctc |
| | | (SEQ ID NO: 26; nucleotides 40614-40663 of SEQ ID NO: 18) |
| 4 | Acceptor | ggggccacatttcttttcattctagCCTTCAAAGCTGTGCCTGTTGTGTC |
| | | (SEQ ID NO: 27; nucleotides 41678-41727 of SEQ ID NO: 18) |
| | Donor | AACGTGGAAAAGAGAAAACAGTCAGgtgagtgaatcgcttcattcttctc |
| | | (SEQ ID NO: 28; nucleotides 41815-41864 of SEQ ID NO: 18) |
| 5 | Acceptor | ttttctccttttctgaaaccagcagACTAAACTACAGGAGAAATATAATA |
| | | (SEQ ID NO: 29; nucleotides 45772-45821 of SEQ ID NO: 18) |
| | Donor | GTCACAACAACCTTGGAAGTAGTAGgtaaatacctctatgggaatgttta |
| | | (SEQ ID NO: 30; nucleotides 45941-45990 of SEQ ID NO: 18) |
| 6 | Acceptor | ttctgtcttatttcattctaattagATAAAGGATTCATTAATATCTTCCC |
| | | (SEQ ID NO: 31; nucleotides 49146-49195 of SEQ ID NO: 18) |
| | Donor | AGTCTGAGAATGAAAGTAATATCAGgtaagaaatggaccttgccctgggg |
| | | (SEQ ID NO: 32; nucleotides 49336-49385 of SEQ ID NO: 18) |
| 7 | Acceptor | ttgactagttgtcttttctttgtagATACGTAAGTGAACTTCATCTAACG |
| | | (SEQ ID NO: 33; nucleotides 51472-51521 of SEQ ID NO: 18) |
| | Donor | ATAGCATTTAATGTTTATGTGAATAgtaagtaacatgaagggctcctttt |
| | | (SEQ ID NO: 34; nucleotides 51588-51637 of SEQ ID NO: 18) |
| 8 | Acceptor | tatggccatttctgttttcctgtagCAAAACCAGAAATCCTGACTTACGA |
| | | (SEQ ID NO: 35; nucleotides 65632-65681 of SEQ ID NO: 18) |
| | Donor | ATTTTTGTCCAGGAACTGAGCAGAGgtgagatgattatttttggcactgc |
| | | (SEQ ID NO: 36; nucleotides 65747-65796 of SEQ ID NO: 18) |
| 9 | Acceptor | ggcttttgttttcttccctttagATGCTCTGCTTCTGTACTGCCAGTG |
| | | (SEQ ID NO: 37; nucleotides 67907-67954 of SEQ ID NO: 18) |
| | Donor | TTTGCATTTAAAGGTAACAACAAAGgtatatttctttttaatccaattta |
| | | (SEQ ID NO: 38; nucleotides 68099-38148 of SEQ ID NO: 18) |
| 10 | Acceptor | attccacatttctcttccattgtagAGCAAATCCATCCCCACACCCTGTT |
| | | (SEQ ID NO: 39; nucleotides 69266-29315 of SEQ ID NO: 18) |
| | Donor | GATTCTGACCTACAAATATTTACAGgtaaccatttatttgttctctctcc |
| | | (SEQ ID NO: 40; nucleotides 69373-69422 of SEQ ID NO: 18) |
| 11 | Acceptor | tctatttttccctttctccccacagAAACCCATGTATGAAGTACAGTGGA |
| | | (SEQ ID NO: 41; nucleotides 69464-69513 of SEQ ID NO: 18) |
| | Donor | TTTCCCAGAAACAGGCTGAGTTTTGgtcagtatgaaacaggggctttcca |
| | | (SEQ ID NO: 42; nucleotides 69591-69640 of SEQ ID NO: 18) |
| 12 | Acceptor | taccttgttgtcttccttcctacagGGAAAACCCTGGGTGCTGGAGCTTT |
| | | (SEQ ID NO: 43; nucleotides 69871-69920 of SEQ ID NO: 18) |
| | Donor | ACTGTCGCTGTAAAGATGCTCAAGCgtaagttcctgtatggtactgcatg |
| | | (SEQ ID NO: 44; nucleotides 69976-70025 of SEQ ID NO: 18) |
| 13 | Acceptor | ctaaaatgcatgtttccaattttagCGAGTGCCCATTTGACAGAACGGGA |
| | | (SEQ ID NO: 45; nucleotides 70059-70108 of SEQ ID NO: 18) |
| | Donor | CTACTTGGAGCCTGCACCATTGGAGgtaaagccgtgtccaagctgccttt |
| | | (SEQ ID NO: 46; nucleotides 70170-70219 of SEQ ID NO: 18) |
| 14 | Acceptor | ctaaccttttcttatgtgcttttagGGCCCACCCTGGTCATTACAGAATA |
| | | (SEQ ID NO: 47; nucleotides 71383-71432 of SEQ ID NO: 18) |
| | Donor | TTCTGCATTCAAAGGAGTCTTCCTGgtaagactgatttacataaatagtt |
| | | (SEQ ID NO: 48; nucleotides 71534-71583 of SEQ ID NO: 18) |
| 15 | Acceptor | tcatgacttgtttcatctctcccagCAGCGATAGTACTAATGAGTACATG |
| | | (SEQ ID NO: 49; nucleotides 73376-73425 of SEQ ID NO: 18) |
| | Donor | GACAAAAGGAGATCTGTGAGAATAGgtgagtacctacctatcaagcaacc |
| | | (SEQ ID NO: 50; nucleotides 73468-73517 of SEQ ID NO: 18) |
| 16 | Acceptor | aagaaaaatcctctcttcctcacagGCTCATACATAGAAAGAGATGTGAC |
| | | (SEQ ID NO: 51; nucleotides 73919-73968 of SEQ ID NO: 18) |
| | Donor | CATGGCTTTCCTCGCCTCCAAGAATgtaagtgggagtgattctctaaaga |
| | | (SEQ ID NO: 52; nucleotides 74047-74096 of SEQ ID NO: 18) |
| 17 | Acceptor | tttcttttctcctccaacctaatagTGTATTCACAGAGACTTGGCAGCCA |
| | | (SEQ ID NO: 53; nucleotides 75118-75167 of SEQ ID NO: 18) |
| | Donor | TTCTAATTATGTGGTTAAAGGAAACgtgagtacccattctctgcttgaca |
| | | (SEQ ID NO: 54; nucleotides 75241-75290 of SEQ ID NO: 18) |
| 18 | Acceptor | tgactctgttgtgcttctattacagGCTCGACTACCTGTGAAGTGGATGG |
| | | (SEQ ID NO: 55; nucleotides 78546-78595 of SEQ ID NO: 18) |
| | Donor | TTTCTTTGGGAGCTGTTCTCTTTAGgtaaaatgatccttgccaaagacaa |
| | | (SEQ ID NO: 56; nucleotides 78658-78707 of SEQ ID NO: 18) |
| 19 | Acceptor | cactgctttgcaaactgtgtctcagGAAGCAGCCCCTATCCTGGAATGCC |
| | | (SEQ ID NO: 57; nucleotides 78769-78818 of SEQ ID NO: 18) |
| | Donor | GCCCTGAACACGCACCTGCTGAAATgtaagagccaaaaaatttttccttt |
| | | (SEQ ID NO: 58; nucleotides 78869-78918 of SEQ ID NO: 18) |
| 20 | Acceptor | atagtaaatggcccttgtcttgcagGTATGACATAATGAAGACTTGCTGG |
| | | (SEQ ID NO: 59; nucleotides 79223-79272 of SEQ ID NO: 18) |
| | Donor | GCAGATTTCAGAGAGCACCAATCATgtgagtataccctggccaggcatag |
| | | (SEQ ID NO: 60; nucleotides 79329-79378 of SEQ ID NO: 18) |

*the ESOs that target these sequences would be the reverse complement of the sequences shown or a subsequence thereof.
**“Acceptor” refers to a target sequence that includes a splice acceptor, and “Donor” refers to a target sequence that includes a splice donor for the listed exon.

[0092] In the listed sequences themselves, intron sequences are provided in lowercase and exon sequences are provided in uppercase.

[0093] In some embodiments of the presently disclosed subject matter provided is an antisense oligomer comprising 10 to 50 linked nucleosides, wherein the oligomer is targeted to a region of an RNA molecule encoding a Kit protein. In some embodiments, hybridization of the oligomer to the RNA molecule modulates splicing of the RNA molecule. In some embodiments of the presently disclosed subject matter provided is an antisense oligomer comprising a nucleic acid sequence sufficiently complementary to a target sequence in a target region of a Kit mRNA molecule, such that the antisense oligomer specifically hybridizes to the target sequence, thereby modulating splicing of a Kit mRNA transcript. These antisense oligomers may comprise, consist essentially of, or consist of 10 to 50 linked nucleosides. These antisense oligomers may comprise 15 to 35 linked nucleotides. These antisense oligomers may consist essentially of or consist of 15 to 35 linked nucleosides. These antisense oligomers may comprise, consist essentially of, or consist of 10 linked nucleosides, 11 linked nucleosides, 12 linked nucleosides, 13 linked nucleosides, 14 linked nucleosides, 15 linked nucleosides, 16 linked nucleosides, 17 linked nucleosides, 18 linked nucleosides, 19 linked nucleosides, 20 linked nucleosides, 21 linked nucleosides, 22 linked nucleosides, 23 linked nucleosides, 24 linked nucleosides, 25 linked nucleosides, 26 linked nucleosides, 27 linked nucleosides, 28 linked nucleosides, 29 linked nucleosides, 30 linked nucleosides, 31 linked nucleosides, 32 linked nucleosides, 33 linked nucleosides, 34 linked nucleosides, 34 linked nucleosides, 36 linked nucleosides, 37 linked nucleosides, 38 linked nucleosides, 39 linked nucleosides, 40 linked nucleosides, 41 linked nucleosides, 42 linked nucleosides, 43 linked nucleosides, 44 linked nucleosides, 45 linked nucleosides, 46 linked nucleosides, 47 linked nucleosides, 48 linked nucleosides, 49 linked nucleosides, or 50 linked nucleosides. The mRNA molecule may encode a Kit protein from any mammal that produces a Kit protein. Examples of such mammals include, but are not limited to, a human, a mouse, a dog, a cat, and a horse. In some embodiments, the mRNA comprises a nucleotide sequence at least 80%, at least 85%, at least 90%, at least 95%, at least 97%, at least 99%, or 100% identical to SEQ ID NO: 8 or SEQ ID NO: 10. In some embodiments, the mRNA encodes a protein comprising an amino acid sequence at least 80%, at least 85%, at least 90%, at least 95%, at least 97%, at least 99% identical to SEQ ID NO: 9 or SEQ ID NO: 11. In some embodiments, the mRNA encodes a protein comprising SEQ ID NO: 9 or SEQ ID NO: 11. The RNA molecule may be a Kit transcript. In some embodiments, the RNA molecule is a Kit mRNA molecule. In some embodiments, the RNA molecule is a Kit pre-mRNA.

[0094] The target region targeted by the antisense oligomer can be any region of the RNA molecule that is functionally involved in splicing of the RNA molecule. By “functionally involved in splicing” is meant the sequences in the target region are utilized by the cellular splicing apparatus (e.g., the spliceosome or components thereof) to effect splicing of the mRNA molecule. Examples of such regions include, but are not limited to, regions comprising intron sequences, regions comprising exon sequences, regions comprising intron/exon junctions, regions comprising splice donor site sequences, regions comprising to splice acceptor site sequences, regions comprising splice enhancer site sequences, regions comprising branch point sequences, and regions comprising polypyrimidine tracts. Such sequences are known to those skilled in the art. Such sequences are also disclosed herein. Thus, in some embodiments, the target region comprises at least a portion of a sequence selected from the group consisting of an exon sequence, an intron sequence, a sequence comprising an exon/intron junction, a splice donor site sequence, a splice acceptor site sequence, a splice enhancer site sequence, a branch point sequence, and a polypyrimidine tract. In the context of this disclosure, “at least a portion” refers to at least 5 nucleosides, at least 6 nucleosides, at least 7 nucleosides, at least 8 nucleosides, at least 9 nucleosides, at least 10 nucleosides, at least 11 nucleotides, at least 12 nucleosides, at least 13 nucleotides, at least 14 nucleosides, at least 15 nucleosides, at least 16 nucleosides, at least 17 nucleosides, at least 18 nucleosides, at least 19 nucleosides, or at least 20 nucleosides in length. In some embodiments, the at least a portion comprises at least 10%, at least 25%, at least 50%, at least 75%, at least 90%, at least 90%, at least 95% or at least 97% of a known splice donor site sequence, splice acceptor site sequence, splice enhancer site sequence, branch point sequence or polypyrimidine sequence. The splice donor site sequence, splice acceptor site sequence, splice enhancer site sequence, branch point sequence or polypyrimidine sequence may be from a Kit pre-MRNA.

[0095] In some embodiments, the target region comprises at least a portion of a Kit sequence of this disclosure, which may be any one of SEQ ID NOs: 8, 10, 12, 14, and 16 or a subsequence of any one of SEQ ID NOs: 18-22. In some embodiments, the at least a portion comprises at least 10%, at least 25%, at least 50%, at least 75%, at least 80%, at least 90% at least 95% or at least 97% of a Kit sequence of this disclosure. In some embodiments, the at least a portion comprises a polynucleotide sequence at least 80%, at least 90% at least 95% or at least 97% identical to a portion of a Kit sequence of this disclosure. In some embodiments, the target region comprises a nucleotide sequence at least 80%, at least 90%, at least 95%, at least 97%, at least 99%, or 100% identical to at least a portion of a sequence selected from the group consisting of SEQ ID NO: 8, SEQ ID NO: 10, SEQ ID NO: 12, SEQ ID NO: 14, SEQ ID NO: 16, SEQ ID NO: 18, SEQ ID NO: 19, SEQ ID NO: 20, SEQ ID NO: 21, or SEQ ID NO: 22. In some embodiments, the target region comprises at least a portion of a sequence selected from the group consisting of SEQ ID NO: 8, SEQ ID NO: 10, SEQ ID NO: 12, SEQ ID NO: 14, SEQ ID NO: 16, SEQ ID NO: 18, SEQ ID NO: 19, SEQ ID NO: 20, SEQ ID NO: 21, or SEQ ID NO: 22.

[0096] In some embodiments, the antisense oligomer is targeted to a region or sequence involved in splicing of a Kit pre-mRNA. In some embodiments, the antisense oligomer is targeted to a Kit intron sequence, a Kit exon sequence, a Kit splice donor site sequence, a Kit splice acceptor site sequence, a Kit splice enhancer site sequence, a Kit branch point sequence, or a Kit polypyrimidine tract. In some embodiments, the antisense oligomer is targeted to exon 4 of a Kit pre-mRNA. In some embodiments, the antisense oligomer is targeted to a Kit exon 4 splice donor sequence, a Kit exon 4 splice acceptor sequence, or a Kit exon 4 spice enhancer sequence. In some embodiments, the antisense oligomer is targeted to a target molecule comprising a sequence at least 80%, at least 90%, at least 95%, at least 97%, at least 99%, or 100% identical to a sequence selected from the group consisting of SEQ ID NO: 8, SEQ ID NO: 10, SEQ ID NO: 12, SEQ ID NO: 14, SEQ ID NO: 16, SEQ ID NO: 18, SEQ ID NO: 19, SEQ ID NO: 20, SEQ ID NO: 21, and SEQ ID NO: 22, or a subsequence thereof. In some embodiments, the antisense oligomer is targeted to a target molecule comprising a sequence selected from the group consisting of SEQ ID NO: 8, SEQ ID NO: 10, SEQ ID NO: 12, SEQ ID NO: 14, SEQ ID NO: 16, SEQ ID NO: 18, SEQ ID NO: 19, SEQ ID NO: 20, SEQ ID NO: 21, and SEQ ID NO: 22, or a subsequence thereof. In some embodiments, the antisense oligomer is targeted to a sequence at least 80%, at least 90%, at least 95%, at least 97%, at least 99%, or 100% identical to a sequence selected from the group consisting of SEQ ID NO: 8, SEQ ID NO: 10, SEQ ID NO: 12, SEQ ID NO: 14, SEQ ID NO: 16, SEQ ID NO: 18, SEQ ID NO: 19, SEQ ID NO: 20, SEQ ID NO: 21, and SEQ ID NO: 22, or a subsequence thereof.

[0097] In some embodiments, the antisense oligomer comprises a targeting sequence at least 80%, at least 90%, at least 95%, at least 97%, or at least 99% identical to a sequence fully complementary to at least a portion of a splice donor site sequence, a splice acceptor site sequence, a splice enhancer site sequence, a branch point sequence or a polypyrimidine sequence from a Kit mRNA. In some embodiments, the antisense oligomer comprises a targeting sequence fully complementary to at least a portion of a splice donor site sequence, a splice acceptor site sequence, a splice enhancer site sequence, a branch point sequence, or a polypyrimidine sequence from a Kit mRNA. In some embodiments, the antisense oligomer comprises a targeting sequence at least 80%, at least 90%, at least 95%, at least 97%, at least 99%, or 100% identical to a sequence fully complementary to at least a portion of a sequence selected from the group consisting of SEQ ID NO: 8, SEQ ID NO: 10, SEQ ID NO: 12, SEQ ID NO: 14, SEQ ID NO: 16, SEQ ID NO: 18, SEQ ID NO: 19, SEQ ID NO: 20, SEQ ID NO: 21, and SEQ ID NO: 22, or a subsequence thereof. The portion is in some embodiments least 10 nucleotides in length. The antisense oligomer may modulate splicing of a Kit pre-mRNA molecule.

[0098] In some embodiments, the target region comprises at least a portion of a sequence selected from a Kit splice donor site sequence, a Kit splice acceptor site sequence, a Kit splice enhancer site sequence, a Kit branch point sequence and a Kit polypyrimidine sequence. In some embodiments, the at least a portion comprises at least 10%, at least 25%, at least 50%, at least 75%, at least 90% or at least 90% of a Kit splice donor site sequence, a Kit splice acceptor site sequence, a Kit splice enhancer site sequence, a Kit branch point sequence or a Kit polypyrimidine sequence. The Kit splice donor site sequence, the Kit splice acceptor site sequence, the Kit splice enhancer site sequence, the Kit branch point sequence, or the Kit polypyrimidine sequence, may be from exon 4 of a Kit pre-mRNA. The portion may be at least 10 nucleotides in length. The antisense oligomer may modulate splicing of a Kit pre-mRNA molecule.

[0099] In some embodiments, the complementary nucleic acid sequence comprised by the antisense oligomer (i.e., the “targeting sequence”) is at least 80%, at least 90%, at least 95%, at least 97%, or at least 99% identical to a sequence fully complementary to at least a portion of a splice donor site sequence, splice acceptor site sequence, splice enhancer site sequence, branch point sequence or polypyrimidine sequence from a Kit mRNA. In some embodiments, the complementary nucleic acid sequence comprised by the antisense oligomer comprises a sequence at least 80%, at least 90%, at least 95%, at least 97%, at least 99%, or 100% identical to a sequence fully complementary to a portion of a sequence selected from the group consisting of SEQ ID NO: 8, SEQ ID NO: 10, SEQ ID NO: 12, SEQ ID NO: 14, SEQ ID NO: 16, SEQ ID NO: 18, SEQ ID NO: 19, SEQ ID NO: 20, SEQ ID NO: 21, and SEQ ID NO: 22, or a subsequence thereof. The portion may be at least 10 nucleotides in length. The antisense oligomer may modulate splicing of a Kit pre-mRNA molecule.

[0100] In some embodiments, an antisense oligomer comprises a sequence at least 80% identical, at least 85% identical, at least 90% identical, at least 95% identical, at least 97% identical, or at least 99% identical to a sequence selected from the group consisting of SEQ ID NOs: 1 and 2. In some embodiments, an antisense oligomer comprises, consists essentially of, or consists of a sequence selected from the group consisting of SEQ ID NO: 1 and 2.

[0101] In some embodiments of the presently disclosed subject matter provided is an expression vector that expresses an antisense oligomer of this disclosure. As used herein, an “expression vector” is a nucleic acid molecule comprising a polynucleotide sequence functionally linked to a promoter, such that transcription of the polynucleotide sequence by a polymerase results in production of an antisense oligomer of this disclosure. Exemplary expression vectors include polynucleotide molecules, in some embodiments DNA molecules, which are derived, for example, from a plasmid, bacteriophage, yeast or virus (e.g., adenovirus, adeno-associated virus, lentivirus, retrovirus, etc.), into which a polynucleotide can be inserted or cloned. Suitable expression vectors are known to those skilled in the art.

[0102] In some embodiments, the presently disclosed subject matter provides a pharmaceutical composition comprising an antisense oligomer or expression vector of this disclosure. Such compositions are suitable for the therapeutic delivery of antisense oligomers, or expression vectors, described herein. Hence, this disclosure provides pharmaceutical compositions that comprise a therapeutically-effective amount of one or more of the antisense oligomers or expression vectors described herein, formulated together with one or more pharmaceutically-acceptable carriers (additives) and/or diluents. While it is possible for an antisense oligomer or expression vector of this disclosure to be administered alone, in some embodiments an antisense oligomer or expression vector of the presently disclosed subject matter is administered as a pharmaceutical composition.

[0103] Pharmaceutical compositions of this disclosure may be specially formulated for administration in solid or liquid form, including those adapted for the following: (1) oral administration, for example, drenches (aqueous or non-aqueous solutions or suspensions), tablets, e.g., those targeted for buccal, sublingual, and systemic absorption, boluses, powders, granules, pastes for application to the tongue; (2) parenteral administration, for example, by subcutaneous, intramuscular, intravenous or epidural injection as, for example, a sterile solution or suspension, or sustained-release formulation; (3) topical application, for example, as a cream, ointment, or a controlled-release patch or spray applied to the skin; (4) intravaginally or intrarectally, for example, as a pessary, cream or foam; (5) sublingually; (6) ocularly; (7) transdermally; (8) inhaled into the lungs, for example, by nebulizer or aerosol inhaler; or (9) nasally. Examples of suitable carriers, additives and diluents are described in U.S. Patent Publication No. 2015/0361428, which is incorporated herein by reference in its entirety.

[0104] As has been described above, antisense oligomers of this disclosure are capable of reducing expression of Kit. Such reduction is achieved by modulating splicing of an mRNA molecule encoding a Kit protein.

[0105] Thus, in some embodiments of the presently disclosed subject matter provided is a method of modulating splicing of a Kit mRNA in a cell, the method comprising contacting the cell with an antisense oligomer of this disclosure. The cell may be any cell expressing a Kit mRNA molecule. Accordingly, the cell can be a cell in culture, or a cell in the body of an individual. In a representative embodiment, the cell is a mast cell.

[0106] In some embodiments of the presently disclosed subject matter provided is a method of inducing apoptosis in mast cells, the method comprising contacting the mast cell with the antisense oligomer of this disclosure.

[0107] Thus, in some embodiments of the presently disclosed subject matter provided is a method of treating a Kit-related disease in an individual, the method comprising administering an antisense oligomer of this is disclosure. In some embodiments, the Kit-related disease is a cancer or mastocytosis. In some embodiments, the cancer is a gastrointestinal stromal tumor or leukemia.

[0108] Mastocytosis is a rare mast cell activation disorder caused by an individual having too many mast cells and mast cell precursors. Because mast cells are involved in atopic responses, individuals suffering from mastocytosis are susceptible to hives, itching and anaphylactic shock. Thus, one method of this disclosure is a method of treating an individual suffering from mastocytosis, the method comprising administering to an individual in need of such treatment an antisense oligomer of this disclosure. The individual may or may not already be exhibiting symptoms of mastocytosis, such as itching, hives and anaphylaxis. In some embodiments, an antisense oligomer is administered to an individual at risk for developing symptoms of mastocytosis.

[0109] The mRNA may comprise a nucleotide sequence at least 80%, at least 85%, at least 90%, at least 95%, at least 97%, at least 99%, or 100% identical to SEQ ID NO: 8, 10, 12, 14, or 16. In some embodiments, the mRNA encodes a protein comprising an amino acid sequence at least 80%, at least 85%, at least 90%, at least 95%, at least 97%, or at least 99% identical to SEQ ID NO: 9, 11, 13, 15, or 17. In some embodiments, the mRNA encodes a protein comprising SEQ ID NO: 9, 11, 13, 15, or 17.

[0110] In some embodiments, the antisense oligomer hybridizes to a target region that is involved in splicing of Kit pre-mRNA. In some embodiments, the antisense oligomer hybridizes to a target region in the mRNA comprising at least a portion of a sequence selected from the group consisting of a Kit splice donor site sequence, a Kit splice acceptor site sequence, a Kit splice enhancer site sequence, a Kit branch point sequence and a Kit polypyrimidine sequence. The Kit splice donor site sequence, the Kit splice acceptor site sequence, the Kit splice enhancer site sequence, the Kit branch point sequence, or the Kit polypyrimidine sequence may be from exon 4 of a Kit pre-mRNA.

[0111] In some embodiments of the presently disclosed subject matter provided is a method of reducing expression of Kit protein in a cell, the method comprising contacting the cell with an antisense oligomer of this disclosure. In embodiments of this disclosure, the cell can be any cell expressing a Kit protein. Accordingly, the cell can be a cell in culture (e.g., tissue culture) or a cell in the body of an individual. In some embodiments, the amount of Kit expressed by the cell is decreased by at least 50%, at least 60%, at least 70%, at least 80%, at least 90%, at least 95%, at least 97%, or at least 99%. In a representative embodiment, the cell is a mast cell.

[0112] An antisense oligomer of this disclosure may be administered to any individual expressing a Kit protein. As used herein, the terms individual, subject, patient, and the like, are meant to encompass any mammal that expresses a Kit protein, such as but not limited to a human, a mouse, a cat, a dog, or a horse. The terms individual, subject, and patient by themselves do not denote a particular age, sex, race, and the like. Thus, individuals of any age, whether male or female, are intended to be covered by this disclosure. Likewise, the methods of this disclosure can be applied to any race of human, including, for example, Caucasian (white), African-American (black), Native American, Native Hawaiian, Hispanic, Latino, Asian, and European. In some embodiments of this disclosure, such characteristics may be significant. In such cases, the significant characteristic(s) (e.g., age, sex, race, etc.) will be indicated. Additionally, the term “individual” encompasses both human and non-human animals. Suitable non-human animals to which antisense oligomers of this disclosure may be administered include, but are not limited to companion animals (i.e. pets), food animals, work animals, or zoo animals. Exemplary animals include, but are not limited to, cats, dogs, horses, ferrets and other Mustelids, cattle, sheep, swine, and rodents.

[0113] Antisense oligomers of this disclosure can be administered to an individual by any suitable route of administration. Examples of such routes include, but are not limited to, oral and parenteral routes, (e.g., intravenous (IV), subcutaneous, intraperitoneal (IP), and intramuscular), inhalation (e.g., nebulization and inhalation) and transdermal delivery (e.g., topical). Any methods effective to deliver an antisense oligomer of this disclosure into the bloodstream of an individual are also contemplated in these methods. For example, transdermal delivery of antisense oligomers may be accomplished by use of a pharmaceutically acceptable carrier adapted for topical administration. Antisense oligomers can be administered in the absence of other molecules, such as proteins or lipids, or they be administered in a complex with other molecules, such as proteins or lipids. For example, the use of cationic lipids to encapsulate antisense oligomers is disclosed in U.S. Pat. Nos. 8,569,256, and 6,806,084, which are incorporated herein by reference in their entirety. Similarly, the use of peptide-linked morpholino antisense oligonucleotides is disclosed in U.S. Patent Publication No. 2015/0238627, which is incorporated herein by reference.

[0114] Because antisense oligomers of this disclosure can reduce Kit-mediated responses, such antisense oligomers can be used to treat allergic conditions. Thus, in some embodiments of the presently disclosed subject matter provided is a method of treating an allergic condition in an individual, by administering to an individual in need of such treatment an antisense oligomer of this disclosure. Allergic conditions being treated can be any condition mediated by a pathway comprising Kit. Such conditions include, but are not limited to, asthma, food allergies allergic conjunctivitis, and atopic dermatitis.

### EXAMPLES

[0115] The following EXAMPLES are put forth so as to provide those of ordinary skill in the art with a complete disclosure and description of how the compounds, compositions, articles, devices and/or methods claimed herein are made and evaluated, and are intended to be purely exemplary and are not intended to limit the disclosure. Efforts have been made to ensure accuracy with respect to numbers (e.g., amounts, temperature, etc.), but some errors and deviations should be accounted for. Unless indicated otherwise, parts are parts by weight, temperature is in ° C. or is at ambient temperature, and pressure is at or near atmospheric.

### Materials and Methods Used in Examples

[0116] Mast cell culture. The HMC-1.2 human MC line was purchased from MilliporeSigma (Burlington, Mass., United States of America) and cultured according to the manufacturer's instructions. The human MC line LAD2 was obtained from Drs. Kirshenbaum and Metcalfe from the Laboratory of Allergic Diseases, NIAID, NIH, Bethesda, Md., United States of America, and cultured as described in Kirshenbaum et al., 2003. BMMCs were obtained and cultured as described in Jensen et al., 2006. Experiments on mice were carried out under a protocol approved by the Institutional Animal Care and Use Committee at North Carolina State University, Raleigh, N.C., United States of America.

[0117] Transfection of MCs with ASOs. MCs were transfected as described in Cruse et al., 2013.

[0118] Receptor expression. Receptor expression was examined by flow cytometry as described in Cruse et al., 2013.

[0119] Apoptosis and viability assays. Apoptosis was assessed with FITC-Annexin V (eBioscience, a division of Thermo Fisher Scientific Inc., Waltham, Mass., United States of America). To assess viability, cells were stained with LIVE/DEAD Green Dead Cell Stain (Invitrogen, Carlsbad, Calif., United States of America), according to the manufacturer's instructions, or propidium iodide. Flow cytometry was performed on a CytoFLEX flow cytometer (Beckman Coulter, Brea, Calif., United States of America).

[0120] Proliferation assays. Proliferation was assessed with CellTrace Far Red (Invitrogen) according to the manufacturer's instructions. Cells were also stained with LIVE/DEAD Green Dead Cell Stain. Additionally, Trypan blue was used to assess viable cell counts.

[0121] Intraperitoneal injection and peritoneal lavage. The protocol was approved by the Institutional Animal Care and Use Committee at NC State University. Peritoneal lavages were carried out after intraperitoneal injections of ASOs. Mast cells were identified as Kit and IgE receptor positive cells by flow cytometry.

[0122] Intradermal injections and skin histology. The protocol was approved by the Institutional Animal Care and Use Committee at North Carolina State University. ASOs were injected into the skin by ID injection and skin sections taken. MCs were identified and counted with toluidine blue staining and H&E was used to assess tissue morphology.

### Supplemental Materials and Methods for the Examples

[0123] Mast cell culture: The HMC-1.2 human MC line was purchased from MilliporeSigma (Burlington, Mass., United States of America) and cultured in Iscove's Modified Dulbecco's Medium (IMDM; MilliporeSigma) supplemented with 10% (vol/vol) fetal bovine serum (FBS) and penicillin (100 U/mL)/streptomycin (100 μg/mL), to according to the manufacturer's instructions. The human MC line LAD2 was obtained from Drs. Kirshenbaum and Metcalfe from the Laboratory of Allergic Diseases, NIAID, NIH and cultured, as described in Kirshenbaum et al., 2003, in StemPro-34 medium containing StemPro-34 Nutrient Supplement, L-glutamine (2 mM), penicillin (100 U/mL)/streptomycin (100 μg/mL) (Gibco; Gaithersburg, Md., United States of America) with 100 ng/mL recombinant human SCF added (R&D Systems, Minneapolis. Minn., United States of America). One-half of the medium supplemented with SCF was changed once per week. Bone marrow-derived MCs (BMMCs) were developed from bone marrow obtained from femurs of C57BL/6J mice (The Jackson Laboratory, Bar Harbor, Me., United States of America), as described in Jensen et al., 2006, and supplemented with recombinant murine 20 ng/mL of murine recombinant SCF and IL-3 (R&D Systems). Experiments on mice were carried out under a protocol approved by the Institutional Animal Care and Use Committee at North Carolina State University.

[0124] Transfection of MCs with ASOs. For transfection of MCs with ASOs, 2×10⁶ human MCs or 3×10⁶ mouse BMMCs were used for each transfection. Transfection was achieved using the Nucleofector II and Cell Line Kit V (Lonza) as described in Cruse et al., 2013. Transfection efficiency was determined using 10 μM FITC-conjugated standard control 25-mer ASO (Gene Tools LLC). Program T-030 was used for LAD2 and HMC-1.2 cells; X-001 was used for mouse BMMCs. Cell viability was monitored during experiments, and there was no evidence of cytotoxicity with ASO transfection. Standard control ASO and KitStop ESO used for experiments were unconjugated.

[0125] ASO design. KitStop ESO was designed to target exon 4 of human c-KIT (Accession No. NM_000222.2 of the GENBANK® biosequence database). A region including the splice donor site was targeted with the following sequence for human c-KIT: 5′-GAATGAAGCGATTCACTCACCTGAC-3′ (SEQ ID NO: 1). For murine c-kit, a region including the splice donor site of murine c-Kit (Accession No. NM_001122733.1 of the GENBANK® biosequence database) was targeted with the following sequence: 5′-AGGACTTAAACAGCACTCACCTGAG-3′ (SEQ ID NO: 2). All oligonucleotides were purchased from Gene Tools LLC. The unconjugated standard control ASO provided by Gene Tools LLC, does not match any known sequence in mammalian genomes and had the following sequence: 5′-CCTCTTACCTCAGTTACAATTTATA-3′ (SEQ ID NO: 3). The standard control ASO has identical chemistry to the KitStop ESO, but because it does not induce exon skipping of any known gene, the standard control ASO an ESO. For in vivo studies, morpholino ESOs linked through the terminal 3′-N to an octaguanidinium dendrimer (Vivo Morpholino) were purchased from Gene Tools, LLC, Philomath, Oreg., United States of America.

[0126] RT-PCR. LAD2, HMC-1.2, and mouse BMMCs were transfected as described above. For LAD2 and HMC-1.2 cells, total RNA was harvested after 48 hours using the RNAeasy plus mini-kit (Qiagen, Germantown, Md., United States of America) according to the manufacturer's instructions with inclusion of the QIAShredder step. For mouse BMMCs, total RNA was harvested after 24 hours following the same protocol. RT-PCR was carried out using the Thermo Fisher Scientific Verso 1-Step RT-PCR kit according to the manufacturer's instructions. The primers used were designed to amplify exon 4 and the surrounding exons and to always spanned multiple exons of c-Kit mRNA targeted by KitStop ESO. For human c-KIT mRNA, the following primers were used: Forward: 5′-GAAGCCTCTTCCCAAGGACT-3′ (SEQ ID NO: 4), Reverse: 5′-GTGTTCAGGTTTGGGGAATG-3′ (SEQ ID NO: 5). For murine c-Kit mRNA, the following primers were used: Forward: 5′-TCATCGAGTGTGATGGGAAA-3′ (SEQ ID NO: 6), Reverse: 5′-TCACAGGGGAGATGTTGATG-3′ (SEQ ID NO: 7).

[0127] Receptor expression. LAD2 and HMC-1.2 cells were transfected with standard control ASO or KitStop ESO, as described above, and incubated for 2-7 days and 24-72 hours, respectively, in complete medium. Transfected BMMCs were incubated for 48 hours in complete medium. For human cells, flow cytometry for surface and total Kit expression was performed at each time point with APC-conjugated anti-human CD117 monoclonal antibodies (clone 104D2) alongside APC-conjugated mouse IgG1, κ, isotype control antibodies (Biolegend, San Diego, Calif., United States of America). For mouse cells, flow cytometry was used to assess expression of surface FcεRIα and Kit using the following antibodies: PE-conjugated anti-mouse FcεRIα (clone MAR-1) monoclonal antibodies alongside PE-conjugated IgG isotype control (eBioscience via Thermo Fisher, Waltham, Mass., United States of America); and FITC-conjugated anti-mouse CD117 (clone 2B8) monoclonal antibodies alongside FITC-conjugated IgG2b, κ, isotype control antibodies (BD Biosciences, San Jose, Calif., United States of America).

[0128] Apoptosis and viability assays. HMC-1.2 cells (2×10⁶) were transfected with standard control ASO or KitStop ESO as described above, and incubated for 24-72 hours in complete IMDM. At each time point, cells were pelleted and analyzed for apoptosis with FITC-Annexin V (eBioscience). To assess viability, cells were stained with LIVE/DEAD Green Dead Cell Stain (Invitrogen), according to the manufacturer's instructions, or propridium iodide. Flow cytometry was performed on a CytoFLEX flow cytometer (Beckman Coulter).

[0129] Proliferation assays. Prior to transfection, HMC-1.2 cells were washed once with PBS. Cells were stained with 1 μM CellTrace Far Red (Invitrogen) at a concentration of 1×10⁶ cells/mL, according to the manufacturer's instructions. Briefly, cells were stained for 20 minutes at 37° C., followed by an addition of 5× volume of culture media for 5 minutes. Cells were pelleted, then resuspended in complete medium and incubated for 10 minutes at 37° C. to allow the CellTrace reagent to undergo acetate hydrolysis. Stained cells were transfected with standard control ASO or KitStop ESO as described above. HMC-1.2 cells were cultured at 37° C. for 24-72 hours. At each designated time point, cells were stained with LIVE/DEAD Green Dead Cell Stain, which was used to identify and gate out dead cells. Proliferating cells were identified with an additional gate set for the single-cell population. Flow cytometry was performed on a CytoFLEX flow cytometer. Additionally, Trypan blue was used to assess viable cell counts across different time points.

[0130] Intraperitoneal injection and peritoneal lavage. Four to eight week old female BALB/c mice were purchased from The Jackson Laboratory and allowed at least 1 week for acclimation prior to enrollment in the intraperitoneal injection study, which was approved by the Institutional Animal Care and Use Committee at North Carolina State University. Treatment groups were administered 50 μl of 0.5 mM KitStop Vivo morpholino ESO or control Vivo morpholino ASO via intraperitoneal injection with a 29 gauge needle at days 0 and 3 under gas anesthesia sedation to prevent trauma and blood contamination during injection. Following euthanasia by AVMA-approved guidelines on day 5, peritoneal fluid was collected via peritoneal lavage. 5 mL of ice cold PBS containing 5% w/v BSA was injected through the abdominal muscles following reflection of the skin overlying the abdomen. The abdomen was gently massaged for 30 seconds and 3-4 mL of peritoneal fluid mixed with lavage fluid was recovered by aspiration into a syringe and transferred into a conical tube on ice for transport. Total mast cell counts by surface Kit and IgE receptor expression were examined by flow cytometry of 1×10⁶ cells from the peritoneum. For RT-PCR, 5×10⁶ cells were pelleted and flash frozen on liquid nitrogen. Total RNA was harvested and RT-PCR was carried out as described above.

[0131] Intradermal injections and skin histology. Four to eight week old female BALB/c mice were purchased from The Jackson Laboratory and allowed at least 1 week for acclimation prior to enrollment in the skin injection study, which was approved by the Institutional Animal Care and Use Committee at North Carolina State University. Mice were administered 2.5 nmol the both KitStop Vivo morpholino ESO and control Vivo morpholino ASO into separate sites of the skin overlying the dorsum 1.5 cm lateral to midline via repeated injection with a 29 gauge needle at days 0, 7 and 14 under gas anesthesia sedation to allow precise injections. Following euthanasia by AVMA-approved guidelines on day 16, 1 cm×1 cm skin sections were excised, fixed for at least 48 hours in 10% neutral buffered formalin, sectioned in 5 micron steps, and stained with either toluidine blue or hematoxylin and eosin. Microscopic examination of skin sections was performed by two ACVP-board certified pathologists wherein one pathologist was blinded to treatment groups. Tallies for intact mast cells containing a nucleus within the plane of section were performed on toluidine blue stained skin sections. Tallies were collected along the entire length of two 5 micron thick tissue sections representing the opposing halves of a cross section through the previously collected 1 cm×1 cm excised formalin-fixed paraffin-embedded skin tissue.

[0132] Humanized xenograft mast cell neoplasia model. NSG mice (NOD-scid IL2R γ^{null}) from Jackson laboratories (Bar Harbor, Me., USA) (6-8 weeks) were injected subcutaneously with 1×10⁶ HMC-1.2 neoplastic MCs into the right flank. Tumor size was measured with a Mitutoyo IP65 caliper. Once tumors reached 50 mm³, mice were injected either i.v. for systemic administration, or subcutaneously near the site of the tumor every 3 days for a maximum of 14 days. For i.v. administration, 8.33 mg/kg KitStop ESO was injected, and for s.c. KitStop, 3.33 mg/kg was injected. Tumor size was measured every day and mice were euthanized when tumors reached 1.5 cm in one dimension or at day 14.

### Example 1

### Skipping of Wild-Type and Mutant c-Kit Exon 4 in ESO-Treated MCs

[0133] Greater than 95% transfection efficiency of ESOs in human and mouse MCs is achieved with no evidence of cytotoxicity, as determined by propidium iodide and Live/Dead staining (Cruse et al., 2016). Analyzing the sequence of human c-KIT pre-mRNA, it was predicted that ESO-induced skipping of exon 4 would introduce a frameshift into the mature mRNA open reading frame. The predicted protein translation from the mRNA contains a premature STOP codon. Thus, frameshifting with ESOs would either induce early termination of c-Kit mRNA translation, resulting in a severely truncated protein, or induce nonsense-mediated mRNA decay (NMD; FIG. 1A). Either outcome to should eliminate expression of Kit receptor. A stable 25-mer morpholino ESO was designed to target the donor splice site of exon 4 in c-Kit pre-mRNA that was termed KitStop. Since the splice site is located early in the mRNA transcript, if production of a truncated protein occurs, this protein would be severely truncated (FIG. 1A). HMC-1.2 cells exhibiting G560V and D816V mutations were tested, as were LAD2 cells, which express wild-type Kit. KitStop induced exon skipping of both mutated c-Kit (FIG. 1B) and wild-type (FIG. 1C) mRNA as indicated by RT-PCR, compared with cells transfected with an equivalent 25-mer standard control ASO.

### Example 2

### Loss of Kit Expression with c-Kit Exon Skipping

[0134] To test whether the introduction of a frameshift into either wild-type or mutant c-Kit mRNA would prevent expression of Kit protein, flow cytometry was used to measure Kit expression in LAD2 and HMC-1.2 cells (for gating strategies, see FIGS. 2E and 2F). MCs express wild-type Kit on their cell surface, but Kit is rapidly internalized following activation by its ligand, SCF. After endocytosis, Kit signals within intracellular compartments before degradation (Wiley & Burke, 2001). Accordingly, both surface (FIGS. 2A & 2C) and total Kit expression (FIGS. 2B & 2D) was measured in LAD2 cells. KitStop reduced surface Kit expression by 94.5±1.4% after 48 hours and by 99.0±0.6% after 7 days (FIG. 2C). In the same cells, total Kit expression was reduced by 93.5±0.9% after 48 hours, and by 95.6±1.8% after 7 days (FIG. 2D). These data demonstrate an almost complete loss of surface and total wild-type Kit expression in KitStop treated human MCs.

[0135] In neoplastic MCs such as the HMC-1.2 cell line, oncogenic Kit signaling occurs within intracellular compartments, independently of SCF (Obata et al., 2014). Consequently, total Kit expression was measured in HMC-1.2 cells (for gating strategies, see FIGS. 3D-3F). Since HMC-1.2 cells proliferate significantly more than LAD2 cells, KIT expression was assessed at shorter time points (FIG. 3A) and it was found that KitStop significantly reduced total mutant KIT expression (FIGS. 3B and 3C). KIT expression partially recovered over 72 hours in HMC-1.2 cells (FIGS. 3B and 3C), but not in LAD2 cells (FIG. 2D). However, the total number of viable cells in the KitStop treated HMC-1.2 cells was lower at 24 hours and reduced over the 72 hours time course compared to standard control ASO-treated cells. Since transfection efficiency is ˜95%, it is likely that a small fraction of cells that were not efficiently transfected with ESO remained after 72 hours and the efficiently transfected cells lost Kit expression and consequently diminished during the experiment.

### Example 3

### Constitutive KIT Signaling in HMC-1.2 Cells is Diminished with KitStop

[0136] The KIT D816V mutation confers constitutive KIT signaling. As further evidence that the effects of KitStop on HMC-1.2 cell survival and proliferation were through KIT-dependent signaling, phosphorylation of KIT and the downstream kinase ERK was examined. ERK was chosen because it is a downstream kinase in the Ras-Raf-MEK-ERK pathway, which is both downstream of KIT signaling and has well established roles in cell proliferation. Both KIT and ERK were constitutively phosphorylated in HMC-1.2 cells (FIG. 4A). Transfection of the KitStop ESO reduced phosphorylation of both KIT (FIG. 4B) and ERK (FIG. 4C) by comparable amounts. Because KitStop effectively reduced functional KIT protein expression rather than inhibiting KIT phosphorylation, this reduction in phosphorylation of KIT was likely a direct result of reduced expression of the constitutively active KIT protein. However, KitStop did not affect ERK expression, compared to β-actin (FIG. 4A), thus the downstream effects on the ERK pathway were due to reduced phosphorylation, which was likely a direct result of reduced KIT protein.

### Example 4

### Frameshifting c-Kit Induced Neoplastic MC Death

[0137] In contrast to non-transformed MCs, which rapidly undergo apoptosis in the absence of exogenous supporting cytokines in vitro (Mekori et al., 1993; Yanagida et al., 1995; Asai et al., 2001), activating c-Kit mutations such as D816V enable constitutive Kit activation. In neoplastic MC diseases and cell lines such as HMC-1.2, constitutive Kit activation enables continuous SCF-independent MC survival and growth. Therefore, it was examined whether KitStop treatment can eliminate the pro-survival effects of imatinib-insensitive activating c-Kit mutations in neoplastic HMC-1.2 cells.

[0138] First, HMC-1.2 cell apoptosis was assessed using FITC-conjugated Annexin V (FIG. 5A; see also FIGS. 5F and 5G). In comparison to cells transfected with the standard control ASO, KitStop treated cells exhibited increased Annexin V-FITC staining over the course of 72 hours (FIGS. 5A and 5B). KitStop reduced the number of non-apoptotic cells over 72 hours (FIG. 5C) with a corresponding increase in early (FIG. 5D) and late (FIG. 5E) apoptotic cells. To examine cell viability, HMC-1.2 cells were stained with propidium iodide (PI; FIG. 6A; see also FIGS. 6F-6H). In contrast to the standard control ASO, KitStop caused increased PI staining over 72 hours (FIG. 6A-6C). A similar pattern of staining was also seen with LIVE/DEAD staining (FIG. 6D; see also 6I and 6J) with an increase in dead cells at each time point measured (FIG. 6E). Taken together, these findings demonstrate that ESO-mediated frameshifting of the c-Kit transcript rapidly induces apoptosis and cell death in neoplastic MCs.

### Example 5

### Frameshifting c-Kit Prevented Neoplastic MC Proliferation

[0139] The effects of c-Kit frameshifting on neoplastic MC proliferation was also examined, given that the activating c-Kit mutations expressed by HMC-1.2 cells facilitate SCF-independent proliferation (Longley et al., 1999; Chan et al., 2013). In contrast to cells transfected with the standard control ASO, KitStop prevented HMC-1.2 growth, as demonstrated by an increase in viable cell number with trypan blue cell counts (FIG. 7A). In addition to total viable cell counts, a proliferation assay was performed using CellTrace dilution and LIVE/DEAD staining. Similarly to the cell counts, the population of viable KitStop treated cells, as determined by LIVE/DEAD staining, retained the CellTrace dye, whereas CellTrace fluorescence in standard control ASO treated cells was increasingly diluted at each time-point (FIGS. 7B and 7C). The percentage of viable non-proliferating cells reduced with time in both standard control ASO and KitStop treated cells (FIG. 7D). However, the reduction in viable non-proliferating cells with KitStop treatment was due to an increase in non-viable cells rather than cells that had proliferated (FIGS. 7B and 7E). Taken together, these findings indicate that the ESO-induced frameshifting of c-Kit markedly suppresses mutant Kit-mediated neoplastic cell growth and survival. Consequently, frameshifting oligonucleotides targeting c-Kit represent an efficient approach to reduce MC burden in vivo.

### Example 6

### In Vivo Depletion of Peritoneal MCs with KitStop ESOs

[0140] Given the success of c-Kit frameshifting oligonucleotides in neoplastic human MCs in vitro, it was sought to assess the efficacy of this approach in vivo to provide proof-of-principle for therapeutic utility. The KitStop ESO targeting mouse c-Kit was tested using mouse bone marrow-derived MCs (BMMCs). KitStop induced exon skipping of murine c-Kit mRNA, as demonstrated by RT-PCR (FIG. 8A) and marked reduction in Kit protein expression (FIGS. 8B and 8C). The efficacy of KitStop in vivo was tested using two intraperitoneal injections, followed by peritoneal lavage (FIG. 8D). Although exon to skipping of c-Kit mRNA was not always evident in peritoneal lavage cells, the level of c-Kit mRNA was markedly diminished in the majority of mice (FIG. 8E), suggesting a reduction in Kit⁺ cells in the peritoneum. Accordingly, flow cytometry of peritoneal lavage cells demonstrated that peritoneal MCs were significantly reduced by ˜50% in KitStop treated mice (FIGS. 8F-8H). Taken together, these data suggest that KitStop functions in vivo and could represent a viable approach to deplete MCs in other tissues as well.

### Example 7

### Local ESO Administration Reduced Skin MC Numbers In Vivo

[0141] As further evidence of the therapeutic potential of KitStop in depletion of MCs in tissues, efficacy of KitStop was determined with intradermal (ID) injection into the skin of the dorsum. KitStop efficacy was assessed in skin because it has been shown that administration of ESOs into skin can effectively downregulate MC function in response to IgE signals and thus provides a model of assessing ESO activity on MCs in vivo (Cruse et al., 2016). MCs are long-lived and abundant in the skin. Therefore, the administration protocol was extended from the peritoneal studies. KitStop or standard control ASO were injected into the back skin of mice three times over a two-week period followed by assessment of skin histology (FIG. 9A). Skin sections were stained with either toluidine blue (FIG. 9B) or H&E (FIG. 9C) to identify MCs and examine histology, respectively. Two ACVP-board certified pathologists assessed MC counts and histology, one was blinded, one was non-blinded, and both pathologists drew comparable counts and conclusions. Examined tissue sections lacked overt lesions. Additionally, the KitStop treated areas of skin had nearly 50% fewer dermal (FIG. 9D) and total skin MCs (FIG. 9E) when compared to the standard control ASO-treated areas of skin taken from the same mice. These data provide further evidence that KitStop depletes mature tissue-resident MCs in vivo.

### Example 8

### Systemic Administration of KitStop ESOs Inhibits Neoplastic MC Growth In Vivo

[0142] Having established that KitStop ESOs function effectively both in vitro and in vivo, KitStop was tested in a therapeutically relevant humanized in vivo model of mast cell neoplasia. NSG mice were inoculated with HMC-1.2 cells that form an aggressive tumor. Once the tumor volume reached about 50 mm³ (day 0), KitStop was administered by either intravenous (IV) or subcutaneous (SC) injection once a day every 3 days and compared to vehicle control (FIG. 10A). Using this conservative administration protocol, it was established that systemic IV administration of KitStop significantly reduced tumor growth, as measured by assessing tumor volume over time (FIG. 10B). After 14 days of treatment, mice were euthanized and the tumors were excised and weighed (FIGS. 10C and 10D). The tumors from the KitStop IV group were significantly smaller than those of both the vehicle control and KitStop SC groups. The spleens showed a trend for reduced size in the KitStop IV group (FIG. 10E), but liver weight (FIG. 10F) and mouse weight over the course of the experiment were not different (FIG. 10G).

[0143] Taken together, these data supported the conclusion that systemic (IV) administration of KitStop significantly inhibited tumor growth in an aggressive humanized mast cell neoplasia model. In addition, KitStop treatment appeared to be well tolerated and mouse weight was mostly unaffected.

### Discussion of the Examples

[0144] The role of constitutive Kit signaling in aberrant MC growth makes the receptor a target for the resulting clonal diseases, which, due to differences in patient age, organ involvement, co-morbidities and disease aggressiveness, are notoriously heterogeneous and difficult to treat (Valent et al., 2017). However, the diversity of c-Kit mutations that underlie oncogenic Kit signaling make targeting the receptor proportionally more difficult. Among these mutations, D816V, which is present in the majority of systemic mastocytosis patients, is particularly problematic. The D816V mutation confers resistance to the TM, imatinib mesylate (Gleevec) by inducing a conformational change in the tyrosine kinase domain of Kit (Antonescu et al., 2005; Theoharides et al., 2015). An emerging treatment for D816V⁺ systemic mastocytosis is the multi-kinase inhibitor, midostaurin, which exhibits high response rates. However, there is still a risk of disease progression and transformation into leukemia even after treatment with midostaurin (Gotlib et al., 2016; Valent et al., 2017). Other neoplastic disorders such as GISTs, in which somatic gain-of-function mutations in c-Kit are also common and predictive of the risk of metastasis (Heinrich et al., 2006; Ito et al., 2014), can be treated with imatinib, but similarly to mastocytosis, imatinib sensitivity can be lost over time with the acquisition of additional c-Kit mutations (Heinrich et al., 2006; Tamborini et al., 2006). Combinations of TKIs can have synergistic inhibitory effects on neoplastic MC growth and could have therapeutic benefit. However, acquired resistance to TKIs remains a risk (Gleixner et al., 2007; Gallogly et al., 2017). Consequently, given the strong association between aberrant MC proliferation and survival with activating c-Kit mutations, a desirable approach for these diseases would be capable of specifically targeting c-Kit with high efficacy, despite the many possible mutations and conformations of the receptor.

[0145] For selective targeting of c-Kit, ASO technology represents a promising approach. Also, progress with new generations of chemical modifications that improve oligonucleotide stability, bioavailability, efficacy and delivery are exciting advances in ASO technology (Juliano, 2016; Godfrey et al., 2017; McClorey & Banerjee, 2018). ASOs are versatile and, depending on their design, are capable of performing a wide range of gene-manipulating applications. For example, some applications of ASOs are to block protein translation, promote exon inclusion, or induce exon skipping of mature mRNA. In the present Examples, ESOs were used to achieve the latter, and to introduce a premature STOP codon in c-Kit mRNA. In doing so, both wild-type and mutant Kit expression was prohibited, but also Kit-dependent neoplastic MC growth and survival in vitro was also significantly inhibited. In neoplastic HMC-1.2 cells, KitStop downregulated intracellular Kit expression, which is particularly significant because the D816V mutation eliminates the need for surface expression of Kit. Instead, oncogenic Kit signaling occurs intracellularly and independently of ligand binding (Obata et al., 2014) and thus lack of mutant Kit expression at the surface negates antibody-based therapeutic approaches. In addition to the in vitro findings, it was showed that administration of KitStop reduced the number of peritoneal MCs and skin MCs in the tissues of mice in vivo. Therefore, KitStop can reduce MC burden. KitStop reduced MC numbers in the peritoneal cavity by ˜50% after four days, and a similar reduction in mature skin mast cells was evident after three treatments. The impact of KitStop on skin MC numbers is particularly important for establishing the potential efficacy of KitStop in diseases such as mastocytosis, since skin involvement is common in this disease, and because skin MCs have long life spans, and ex vivo skin MCs are resistant to growth factor and SCF withdrawal (Hazzan et al., 2017).

[0146] Two representative reasons for choosing to modify pre-mRNA splicing, rather than target c-Kit using conventional siRNA approaches, are the sheer abundance of c-Kit transcripts expressed by MCs and the inefficacy of siRNA approaches on MCs, particularly in vivo. KitStop targeting of c-Kit mRNA resulted in apparent inefficient exon skipping in human and mouse MCs when measured by RT-PCR. Inefficient exon skipping was most likely due to stoichiometry and the abundance of c-Kit mRNA transcripts compared to ESOs in the cell. Exon skipping efficiency is improved with testing different ESOs that target other splicing regulatory sites of the exon. However, even with apparent inefficient exon skipping, KitStop efficiently reduced wild type and mutant Kit protein expression with loss of proliferation and marked induction of apoptosis and cell death. KitStop may result in production of a severely truncated C-terminal protein. CRISPR/Cas systems that introduce a frameshift into transcripts result in NMD of transcripts, but NMD is often inefficient and C-terminal truncated proteins are produced that are difficult to detect (Reber et al., 2018). Thus, in contrast to conventional siRNA approaches that rely on RNase H or RNA-induced silencing complex (RISC)-mediated pathways of transcript degradation, inefficient of saturated mRNA decay with ESOs may result in production of non-functional or dominant negative proteins rather than losing efficiency of knockdown. While it is not desired to be bound by any particular theory of operation, for high copy number non-desirable transcripts, such as mutant c-Kit, this phenomenon likely plays a role in therapeutic success. Nevertheless, because ESOs are reversible manipulation of transcripts, which do not alter the genome, production of a severely truncated protein would be temporary. Therefore, the presently disclosed subject matter has advantages in certain therapeutic applications over CRISPR/Cas systems that must overcome internal regulatory processes in certain cell types in order to make the targeted changes to the gene of interest (Haapaniemi et al., 2018; Ihry et al., 2018).

[0147] In summary, the presently disclosed in vitro and in vivo data are proof-of-concept for developing ESO-induced frameshifting of c-Kit as a therapeutic treatment for MC neoplastic diseases. These experiments with wild-type mice were proof-of-concept steps towards assessing the therapeutic potential of KitStop. As has been discussed previously (Cruse et al., 2016), ESOs represent reversible therapies thereby avoiding irreversible alteration of the genome. The nonsense frameshift induced by KitStop represents a promising approach for treatment of MC neoplasia and GISTs, and represents a Kit-specific therapeutic strategy that has translational potential for clinical applications. Furthermore, c-Kit plays a role in other types of cancer, including those that are Kit-driven, such as certain melanomas, and those that acquire secondary c-Kit mutations, such as small cell lung cancer and brain tumors, in which c-Kit mutations subsequently contribute to tumor progression (reviewed in Pittoni et al., 2011). The therapeutic potential of ESOs used to alter mRNA splice variants and protein isoforms have already been highlighted in diseases such as hypercholesterolemia and cardiovascular disease (Disterer et al., 2013), breast cancer (Wan et al., 2009), and allergy (Cruse et al., 2016). Although improvements can be made towards specific delivery platforms for ESOs, the recent approval of the ESO eteplirsen for the treatment of DMD (Dowling, 2016; Syed, 2016) demonstrates increased likelihood that other ESOs will emerge as personalized and targeted therapeutics.

### REFERENCES

[0148] All references listed below, as well as all references cited in the instant disclosure, including but not limited to all patents, patent applications and publications thereof, scientific journal articles, and database entries (e.g., GENBANK® database entries and all annotations available therein) are incorporated herein by reference in their entireties to the extent that they supplement, explain, provide a background for, or teach methodology, techniques, and/or compositions employed herein.
[0149] Antonescu et al. (2005) Clin Cancer Res 11(11): 4182-4190.
[0150] Arock et al. (2015) Leukemia 29(6): 1223-1232.
[0151] Asai et al. (2001) Immunity 14(6): 791-800.
[0152] Berger et al. (2000) Nuc Acid Res 28:2911-2914.
[0153] Besmer et al. (1986) Nature 320(6061): 415-421.
[0154] Chan et al. (2013) Clin Exp Dermatol 38(5): 538-544.
[0155] Cruse et al. (2013) Immunity 38(5): 906-917.
[0156] Cruse et al. (2014) Immunol Allergy Clin North Am 34(2): 219-237.
[0157] Cruse et al. (2016) Proc Natl Acad Sci USA 113(49): 14115-14120.
[0158] Disterer et al. (2013) Mol Ther 21(3): 602-609.
[0159] Dowling (2016) Nat Rev Neurol 12(12): 675-676.
[0160] Galli et al. (1995) Int Arch Allergy Immunol 107(1-3): 51-53.
[0161] Gallogly et al. (2017) Ther Adv Hematol 8(9): 245-261.
[0162] Giebel et al. (1992) Oncogene 7(11): 2207-2217.
[0163] Gleixner et al. (2006) Blood 107(2): 752-759.
[0164] Gleixner et al. (2007) Haematologica 92(11): 1451-1459.
[0165] Godfrey et al. (2017) EMBO Mol Med 9(5): 545-557.
[0166] Gotlib et al. (2016) N Engl J Med 374(26): 2530-2541.
[0167] Haapaniemi et al. (2018) Nat Med 24(7):927-930.
[0168] Hazzan et al. (2017) Cell Death Discov 3: 17048.
[0169] Heinrich et al. (2006) J Clin Oncol 24(29): 4764-4774.
[0170] Iemura et al. (1994) Am J Pathol 144(2): 321-328.
[0171] Ihry et al. (2018) Nat Med 24(7):939-946.
[0172] Ito et al. (2014) Int J Clin Exp Pathol 7(11): 8024-8031.
[0173] Jensen et al. (2006) Curr Protoc Immunol Chapter 3: Unit 3.23.
[0174] Jensen et al. (2008) Br J Pharmacol 154(8): 1572-1582.
[0175] Juliano (2016) Nucleic Acids Res 44(14): 6518-6548.
[0176] Kirshenbaum et al. (2003) Leuk Res 27(8): 677-682.
[0177] Longley et al. (1999) Proc Natl Acad Sci USA 96(4): 1609-1614.
[0178] Ma et al. (2002) Blood 99(5): 1741-1744.
[0179] McClorey & Banerjee (2018) Biomedicines 6(2): 10.3390/biomedicines6020051.
[0180] Mekori et al. (1993) J Immunol 151(7): 3775-3784.
[0181] Miettinen et al. (2002) Eur J Cancer 38 Suppl 5: S39-51.
[0182] Obata et al. (2014) Nat Commun 5: 5715.
[0183] Pardanani et al. (2003) Lancet 362(9383): 535-536.
[0184] Pittoni et al. (2011) Oncogene 30(7): 757-769.
[0185] Reber et al. (2018) Mol Biol Cell 29(2): 75-83.
[0186] Syed (2016) Drugs 76(17): 1699-1704.
[0187] Tamborini et al. (2006) Oncogene 25(45): 6140-6146.
[0188] Taniguchi et al. (1999) Cancer Res 59(17): 4297-4300.
[0189] Theoharides et al. (2015) N Engl J Med 373(19): 1885-1886.
[0190] Tsai M et al. (1991) Proc Natl Acad Sci USA 88(14): 6382-6386.
[0191] U.S. Pat. Nos. 6,806,084; 8,569,256; 8,765,703; 8,946,183.
[0192] U.S. Patent Publication Nos. 2015/0238627; 2015/0376615.
[0193] Valent et al. (2017) Cancer Res 77(6): 1261-1270.
[0194] Wan et al. (2009) Int J Cancer 124(4): 772-777.
[0195] Wiley & Burke (2001) Traffic 2(1): 12-18.
[0196] Wu et al. (2012) Int J Mol Med 30(1):63-68.
[0197] Yanagida et al. (1995) Blood 86(10): 3705-3714.
[0198] Yang et al. (2015) Am J Transl Res 7(9):1499-1509.

[0199] It will be understood that various details of the presently disclosed subject matter can be changed without departing from the scope of the presently disclosed subject matter. Furthermore, the foregoing description is for the purpose of illustration only, and not for the purpose of limitation.

1. An antisense oligomer comprising 10 to 50 linked nucleotides, wherein the antisense oligomer is targeted to a region of a Kit-encoding pre-mRNA, and wherein the targeted region comprises sequences involved in splicing of the Kit-encoding pre-mRNA.

2. The antisense oligomer of claim 1, wherein hybridization of the antisense oligomer to the Kit-encoding pre-mRNA alters splicing of the pre-mRNA.

3. The antisense oligomer of claim 1, wherein hybridization of the antisense oligomer to the Kit-encoding pre-mRNA reduces expression of Kit protein.

4. The antisense oligomer of claim 3, wherein the Kit protein for which expression is reduced is a wild type Kit protein or a mutant Kit protein.

5. The antisense oligomer of claim 1, wherein the targeted region comprises at least a portion of a polynucleotide sequence selected from the group consisting of an intron sequence, an exon sequence, a sequence comprising an intron/exon junction, a splice donor sequence, a slice acceptor sequence, a splice enhancer sequence, a splice branch point sequence, or a polypyrimidine tract.

6. The antisense oligomer of claim 5, wherein the polynucleotide sequence is associated with a Kit exon selected from the group consisting of Kit exons 2-20, such as but not limited to an exon 4 splice donor sequence.

7. The antisense oligomer of claim 1, wherein the Kit-encoding pre-mRNA is transcribed from a c-Kit gene.

8. The antisense oligomer of claim 1, wherein the Kit protein is selected from the group consisting of a human KIT protein, a murine Kit protein, a canine Kit protein, a feline Kit protein, and an equine Kit protein.

9. The antisense oligomer of claim 7, wherein hybridization of the antisense oligomer to the c-Kit pre-mRNA results in production of a mature c-Kit mRNA molecule that lacks at least a portion of exon 4.

10. The antisense oligomer of claim 8, wherein hybridization of the antisense oligomer to the c-Kit pre-mRNA results in production of an mRNA molecule encoding a truncated Kit protein.

11. The antisense oligomer of claim 1, wherein the 10 to 50 linked nucleotides comprises a targeting nucleic acid sequence sufficiently complementary to a target nucleic acid sequence in the Kit-encoding pre-mRNA, such that the oligonucleotide specifically hybridizes to the target sequence.

12. The antisense oligomer of claim 11, wherein hybridization of the antisense oligomer to the Kit-encoding pre-mRNA alters splicing of the pre-mRNA.

13. The antisense oligomer of claim 11, wherein hybridization of the antisense oligomer to the Kit-encoding pre-mRNA reduces expression of Kit protein.

14. The antisense oligomer of claim 13, wherein the Kit protein for which expression is reduced is a wild type Kit protein or a mutant Kit protein.

15. The antisense oligomer of claim 13, wherein the targeting sequence comprises at least 6 contiguous nucleobases fully complementary to at least 6 contiguous nucleobases in the target sequence.

16. The antisense oligomer of claim 11, wherein the targeting sequence is at least 80% complementary over its entire length to a similarly sized run of contiguous nucleobases in the target sequence.

17. The antisense oligomer of claim 11, wherein the target sequence comprises at least a portion of a polynucleotide sequence selected from the group consisting of an intron sequence, an exon sequence, a sequence comprising an intron/exon junction, a splice donor sequence, a slice acceptor sequence, a splice enhancer sequence, a splice branch point sequence, or a polypyrimidine tract.

18. The antisense oligomer of claim 17, wherein the polynucleotide sequence is associated with a Kit exon selected from the group consisting of Kit exons 2-20, such as but not limited to an exon 4 splice donor sequence.

19. The antisense oligomer of claim 11, wherein the Kit-encoding pre-mRNA is transcribed from a c-Kit gene.

20. The antisense oligomer of claim 11, wherein the Kit protein is selected from the group consisting of a human Kit protein, a murine Kit protein, a canine Kit protein, a feline Kit protein, and an equine Kit protein.

21. The antisense oligomer of claim 20, wherein the target sequence comprises at least a portion of a polynucleotide sequence selected from the group consisting of SEQ ID NOs: 18-22, optionally wherein the target sequence comprises at least a portion of a polynucleotide sequence selected from the group consisting of SEQ ID NOs: 23-60.

22. The antisense oligomer of claim 21, wherein the portion is at least 10 contiguous nucleotides.

23. The antisense oligomer of claim 21, wherein the target sequence comprises a sequence at least 90% identical to a subsequence of SEQ ID NOs: 18-22, optionally wherein the target sequence comprises a sequence at least 90% identical to one of SEQ ID NOs: 23-60.

24. The antisense oligomer of claim 21, wherein the target sequence hybridizes preferentially to a sequence selected from the group consisting of SEQ ID NOs: 1, 2, and 23-60.

25. The antisense oligomer of claim 20, wherein the targeting sequence comprises at least 10 contiguous nucleobases identical in sequence to at least 10 contiguous nucleobases in a sequence selected from the group consisting of SEQ ID NOs: 1, 2, and the reverse complement of one of SEQ ID NOs: 23-60.

26. The antisense oligomer of claim 20, wherein the targeting sequence comprises a sequence at least 80% complimentary to the reverse complement of at least a portion of a subsequence of SEQ ID NOs: 18-60.

27. The antisense oligomer of claim 20, wherein the targeting sequence is at least 80% identical over the full length of a sequence selected from the group consisting of SEQ ID NOs: 1, 2, and the reverse complement of one of SEQ ID NOs: 23-60.

28. The antisense oligomer of claim 20, wherein the targeting sequence is selected from the group consisting of SEQ ID NOs: 1, 2, and the reverse complement of one of SEQ ID NOs: 23-60.

29. The antisense oligomer of claim 2, wherein the c-Kit transcript comprises any of SEQ ID NOs: 8, 10, 12, 14, and 16, or an open reading frame present therein.

30. The antisense oligomer of claim 1, wherein the antisense oligomer is an antisense RNA molecule.

31. The antisense oligomer of claim 30, wherein the antisense RNA molecule comprises a modification selected from the group consisting of a nucleotide modification, an internucleotide modification, a sugar modification, a sugar-internucleotide linkage modification, and combinations thereof.

32. An expression vector encoding the antisense oligomer of claim 1.

33. The antisense oligomer of claim 1, wherein the antisense oligomer is a morpholino oligomer.

34. A pharmaceutical composition comprising the antisense oligomer of claim 1.

35. A method for modulating splicing of a Kit pre-RNA in a cell and/or a tissue, the method comprising contacting the cell and/or the tissue with the antisense oligomer of claim 1.

36. A method for inducing apoptosis in mast cells, the method comprising contacting the mast cell with the antisense oligomer of claim 1.

37. The method of claim 35, wherein the method is performed in an individual.

38. A method for treating a disease, disorder, or condition associated with Kit expression in an individual, the method comprising administering to the individual an antisense oligomer of claim 1.

39. The method of claim 38, wherein the disease, disorder, or condition associated with Kit expression is a cancer or mastocytosis.

40. The method of claim 39, wherein the cancer is a gastrointestinal stromal tumor or leukemia.

41. The method of claim 40, wherein the individual is an animal, optionally a mammal.

42. The method of claim 41, wherein the individual is a human, a mouse, a dog, a cat, or a horse.

43. A pharmaceutical composition comprising the expression vector of claim 32.

44. A pharmaceutical composition comprising the morpholino oligomer of claim 33.

45. A method for modulating splicing of a Kit pre-RNA in a cell and/or a tissue, the method comprising contacting the cell and/or the tissue with the expression vector of claim 32.

46. A method for modulating splicing of a Kit pre-RNA in a cell and/or a tissue, the method comprising contacting the cell and/or the tissue with the morpholino oligomer of claim 33.

47. A method for inducing apoptosis in mast cells, the method comprising contacting the mast cell with the expression vector of claim 32.

48. A method for inducing apoptosis in mast cells, the method comprising contacting the mast cell with the morpholino oligomer of claim 33.

49. A method for treating a disease, disorder, or condition associated with Kit expression in an individual, the method comprising administering to the individual the expression vector of claim 32.

50. A method for treating a disease, disorder, or condition associated with Kit expression in an individual, the method comprising administering to the individual the morpholino oligomer of claim 33.

The application's sequence listing, which the Patent Office published only in electronic form, follows.

SEQUENCE LISTING (60 sequences)

SEQ ID NO: 1 - DNA, 25 bp, Homo sapiens
gaatgaagcgattcactcacctgac

SEQ ID NO: 2 - DNA, 25 bp, Mus musculus
aggacttaaacagcactcacctgag

SEQ ID NO: 3 - DNA, 25 bp, Artificial Sequence
  Artificially synthesized ESO control oligonucleotide
cctcttacctcagttacaatttata

SEQ ID NO: 4 - DNA, 20 bp, Homo sapiens
gaagcctcttcccaaggact

SEQ ID NO: 5 - DNA, 20 bp, Homo sapiens
gtgttcaggtttggggaatg

SEQ ID NO: 6 - DNA, 20 bp, Mus musculus
tcatcgagtgtgatgggaaa

SEQ ID NO: 7 - DNA, 20 bp, Mus musculus
tcacaggggagatgttgatg

SEQ ID NO: 8 - DNA, 5190 bp, Homo sapiens
  CDS (88)..(3018)
tctgggggctcggctttgccgcgctcgctgcacttgggcgagagctggaacgtggaccagagctcggatcccatcgcagctaccgcgatgagaggcgctcgcggcgcctgggattttctctgcgttctgctcctactgcttcgcgtccagacaggctcttctcaaccatctgtgagtccaggggaaccgtctccaccatccatccatccaggaaaatcagacttaatagtccgcgtgggcgacgagattaggctgttatgcactgatccgggctttgtcaaatggacttttgagatcctggatgaaacgaatgagaataagcagaatgaatggatcacggaaaaggcagaagccaccaacaccggcaaatacacgtgcaccaacaaacacggcttaagcaattccatttatgtgtttgttagagatcctgccaagcttttccttgttgaccgctccttgtatgggaaagaagacaacgacacgctggtccgctgtcctctcacagacccagaagtgaccaattattccctcaaggggtgccaggggaagcctcttcccaaggacttgaggtttattcctgaccccaaggcgggcatcatgatcaaaagtgtgaaacgcgcctaccatcggctctgtctgcattgttctgtggaccaggagggcaagtcagtgctgtcggaaaaattcatcctgaaagtgaggccagccttcaaagctgtgcctgttgtgtctgtgtccaaagcaagctatcttcttagggaaggggaagaattcacagtgacgtgcacaataaaagatgtgtctagttctgtgtactcaacgtggaaaagagaaaacagtcagactaaactacaggagaaatataatagctggcatcacggtgacttcaattatgaacgtcaggcaacgttgactatcagttcagcgagagttaatgattctggagtgttcatgtgttatgccaataatacttttggatcagcaaatgtcacaacaaccttggaagtagtagataaaggattcattaatatcttccccatgataaacactacagtatttgtaaacgatggagaaaatgtagatttgattgttgaatatgaagcattccccaaacctgaacaccagcagtggatctatatgaacagaaccttcactgataaatgggaagattatcccaagtctgagaatgaaagtaatatcagatacgtaagtgaacttcatctaacgagattaaaaggcaccgaaggaggcacttacacattcctagtgtccaattctgacgtcaatgctgccatagcatttaatgtttatgtgaatacaaaaccagaaatcctgacttacgacaggctcgtgaatggcatgctccaatgtgtggcagcaggattcccagagcccacaatagattggtatttttgtccaggaactgagcagagatgctctgcttctgtactgccagtggatgtgcagacactaaactcatctgggccaccgtttggaaagctagtggttcagagttctatagattctagtgcattcaagcacaatggcacggttgaatgtaaggcttacaacgatgtgggcaagacttctgcctattttaactttgcatttaaaggtaacaacaaagagcaaatccatccccacaccctgttcactcctttgctgattggtttcgtaatcgtagctggcatgatgtgcattattgtgatgattctgacctacaaatatttacagaaacccatgtatgaagtacagtggaaggttgttgaggagataaatggaaacaattatgtttacatagacccaacacaacttccttatgatcacaaatgggagtttcccagaaacaggctgagttttgggaaaaccctgggtgctggagctttcgggaaggttgttgaggcaactgcttatggcttaattaagtcagatgcggccatgactgtcgctgtaaagatgctcaagccgagtgcccatttgacagaacgggaagccctcatgtctgaactcaaagtcctgagttaccttggtaatcacatgaatattgtgaatctacttggagcctgcaccattggagggcccaccctggtcattacagaatattgttgctatggtgatcttttgaattttttgagaagaaaacgtgattcatttatttgttcaaagcaggaagatcatgcagaagctgcactttataagaatcttctgcattcaaaggagtcttcctgcagcgatagtactaatgagtacatggacatgaaacctggagtttcttatgttgtcccaaccaaggccgacaaaaggagatctgtgagaataggctcatacatagaaagagatgtgactcccgccatcatggaggatgacgagttggccctagacttagaagacttgctgagcttttcttaccaggtggcaaagggcatggctttcctcgcctccaagaattgtattcacagagacttggcagccagaaatatcctccttactcatggtcggatcacaaagatttgtgattttggtctagccagagacatcaagaatgattctaattatgtggttaaaggaaacgctcgactacctgtgaagtggatggcacctgaaagcattttcaactgtgtatacacgtttgaaagtgacgtctggtcctatgggatttttctttgggagctgttctctttaggaagcagcccctatcctggaatgccggtcgattctaagttctacaagatgatcaaggaaggcttccggatgctcagccctgaacacgcacctgctgaaatgtatgacataatgaagacttgctgggatgcagatcccctaaaaagaccaacattcaagcaaattgttcagctaattgagaagcagatttcagagagcaccaatcatatttactccaacttagcaaactgcagccccaaccgacagaagcccgtggtagaccattctgtgcggatcaattctgtcggcagcaccgcttcctcctcccagcctctgcttgtgcacgacgatgtctgagcagaatcagtgtttgggtcacccctccaggaatgatctcttcttttggcttccatgatggttattttcttttctttcaacttgcatccaactccaggatagtgggcaccccactgcaatcctgtctttctgagcacactttagtggccgatgatttttgtcatcagccaccatcctattgcaaaggttccaactgtatatattcccaatagcaacgtagcttctaccatgaacagaaaacattctgatttggaaaaagagagggaggtatggactgggggccagagtcctttccaaggcttctccaattctgcccaaaaatatggttgatagtttacctgaataaatggtagtaatcacagttggccttcagaaccatccatagtagtatgatgatacaagattagaagctgaaaacctaagtcctttatgtggaaaacagaacatcattagaacaaaggacagagtatgaacacctgggcttaagaaatctagtatttcatgctgggaatgagacataggccatgaaaaaaatgatccccaagtgtgaacaaaagatgctcttctgtggaccactgcatgagcttttatactaccgacctggtttttaaatagagtttgctattagagcattgaattggagagaaggcctccctagccagcacttgtatatacgcatctataaattgtccgtgttcatacatttgaggggaaaacaccataaggtttcgtttctgtatacaaccctggcattatgtccactgtgtatagaagtagattaagagccatataagtttgaaggaaacagttaataccattttttaaggaaacaatataaccacaaagcacagtttgaacaaaatctcctcttttagctgatgaacttattctgtagattctgtggaacaagcctatcagcttcagaatggcattgtactcaatggatttgatgctgtttgacaaagttactgattcactgcatggctcccacaggagtgggaaaacactgccatcttagtttggattcttatgtagcaggaaataaagtataggtttagcctccttcgcaggcatgtcctggacaccgggccagtatctatatatgtgtatgtacgtttgtatgtgtgtagacaaatatttggaggggtatttttgccctgagtccaagagggtcctttagtacctgaaaagtaacttggctttcattattagtactgctcttgtttcttttcacatagctgtctagagtagcttaccagaagcttccatagtggtgcagaggaagtggaaggcatcagtccctatgtatttgcagttcacctgcacttaaggcactctgttatttagactcatcttactgtacctgttccttagaccttccataatgctactgtctcactgaaacatttaaattttaccctttagactgtagcctggatattattcttgtagtttacctctttaaaaacaaaacaaaacaaaacaaaaaactccccttcctcactgcccaatataaaaggcaaatgtgtacatggcagagtttgtgtgttgtcttgaaagattcaggtatgttgcctttatggtttcccccttctacatttcttagactacatttagagaactgtggccgttatctggaagtaaccatttgcactggagttctatgctctcgcacctttccaaagttaacagattttggggttgtgttgtcacccaagagattgttgtttgccatactttgtctgaaaaattcctttgtgtttctattgacttcaatgatagtaagaaaagtggttgttagttatagatgtctaggtacttcaggggcacttcattgagagttttgtcttggatattcttgaaagtttatatttttataattttttcttacatcagatgtttctttgcagtggcttaatgtttgaaattattttgtggctttttttgtaaatattgaaatgtagcaataatgtcttttgaatattcccaagcccatgagtccttgaaaatattttttatatatacagtaactttatgtgtaaatacataagcggcgtaagtttaaaggatgttggtgttccacgtgttttattcctgtatgttgtccaattgttgacagttctgaagaattctaataaaatgtacatatataaatcaaaaaaaaaaaaaaaa

SEQ ID NO: 9 - protein, 976 aa, Homo sapiens [sequence omitted]

SEQ ID NO: 10 - DNA, 5205 bp, Mus musculus
  CDS (66)..(3005)
gctcggtgcacttgggcgagagctgtagcagagagaggagctcagagtctagcgcagccaccgcgatgagaggcgctcgcggcgcctgggatctgctctgcgtcctgttggtcctgctccgtggccagacagccacgtctcagccatctgcaagtccaggggagccgtctccgccatccatccatccagcacaatcagagttaatagttgaagctggcgacaccctcagcctgacgtgcattgatcccgactttgtcagatggactttcaagacctatttcaatgaaatggttgagaataaaaaaaatgaatggatccaggaaaaagccgaggccactcgcacgggcacatacacgtgcagcaacagcaatggcctcacgagttctatttacgtgtttgttagagatcctgccaaacttttcctggttggccttcccttgtttggcaaagaagacagcgacgcgctggtccgctgccctctgacagacccacaggtgtccaattattccctcatcgagtgtgatgggaaatctctccccacggacctgacgtttgtcccaaaccccaaggctggcatcaccatcaaaaacgtgaagcgcgcctaccaccggctctgtgtccgctgtgctgctcagcgtgacggtacatggctgcattctgacaaattcaccctcaaagtgcgggcagccatcaaggctatccctgttgtgtctgtgcctgaaacaagtcacctccttaagaaaggggacacatttacggtggtgtgcaccataaaagatgtgtctacatccgtgaactccatgtggctaaagatgaaccctcagcctcagcacatagcccaggtaaagcacaatagctggcaccggggtgacttcaattatgaacgccaggagacgctgactatcagctcggcaagagttgacgattctggagtgttcatgtgttatgccaataatacttttggatcagcaaatgtcacaacaaccttgaaagtagtagaaaaaggattcatcaacatctcccctgtgaagaacactacagtatttgtaaccgatggagaaaacgtagatttggttgttgaatacgaggcctaccccaaacccgagcaccagcagtggatatatatgaacaggacctcggctaacaaagggaaggattatgtcaaatctgataacaaaagcaacatcagatatgtgaaccaacttcgcctgaccagattaaaaggcacagaaggaggcacttatacctttctggtgtccaactctgatgccagtgcttccgtgacattcaacgtttacgtgaacacaaaaccagaaatcctgacgtacgacaggctcataaatggcatgctccagtgtgtggcagagggattcccggagcccacaatagattggtatttttgtacaggagcagagcaaaggtgtaccactcctgtctcaccagtggacgtacaggtccagaatgtatctgtgtcaccatttggaaaactggtggttcagagttccatagactccagcgtcttccggcacaacggcacggtggagtgtaaggcctccaacgatgtgggcaagagttccgccttctttaactttgcatttaaaggtaacaacaaagagcaaatccaggcccacactctgttcacgccgctgctcattggctttgtggttgcagctggcgcgatggggatcattgtgatggtgctcacctacaaatatttgcagaaacccatgtatgaagtacaatggaaggttgtcgaggagataaatggaaacaattatgtttacatagacccgacgcaacttccttatgatcacaaatgggagtttcccagaaacaggctgagttttggaaagacattgggagctggtgccttcgggaaggtcgttgaggccactgcatatggcttgattaagtcggatgctgccatgacagttgccgtgaagatgctcaaaccaagtgcccatttaacagaaagagaggccctaatgtcggaactgaaggtcctgagctacctgggcaatcacatgaatattgtgaacctgcttggcgcatgcacggtgggagggcccaccctggtcattacagaatattgttgctatggtgatcttttgaattttttgagaaggaagcgtgactcgtttattttctcaaagcaagaagagcaggcagaagcggcactttataagaaccttctgcactcaacggagccttcctgtgacagttcaaatgaatatatggacatgaagcctggcgtttcctacgtggtgccaaccaagacagacaagaggagatccgcaagaatagactcgtacatagaaagagacgtgactcctgccatcatggaagatgacgagctggctctggacctggatgatttgctgagcttctcctaccaggtggccaagggcatggcgttcctcgcctccaagaattgtattcacagagatttggcagccaggaatatcctcctcactcacgggcggatcacaaagatttgcgatttcgggctagccagagacatcaggaatgattcgaattacgtggtcaaaggaaatgcacgactgcccgtgaagtggatggcaccagagagcattttcagctgcgtgtacacatttgaaagtgatgtctggtcctatgggattttcctctgggagctcttctccttaggaagcagcccctacccagggatgccggtcgactccaagttctacaagatgatcaaggaaggcttccggatggtcagcccggagcacgcgcctgccgaaatgtatgacgtcatgaagacttgctgggacgctgaccccttgaaaaggccaacattcaagcaggttgtccaacttattgagaagcagatctcggacagcaccaagcacatttactccaacttggcaaactgcaaccccaacccagagaaccccgtggtggtggaccattccgtgagggtcaactcggtgggcagcagcgcctcttctacgcagcccctgctcgtgcacgaagatgcctgagcagaaacccaagtccaacaggctttgctgctgtctccgaccccgtccttctggcttctgtgatggttacttggtttccctttgacttgcatcctattccagggtagcgagttccccaccccacctccaaccccactgtgattccgcctttacgagcacacactttagtggccgatggccttttcttttctgccatcagccaccgtcccgctgcgaaggtccgaactgtatgtatatattttcccaatagcaaagtagctcctactgtaaacagaaggactcctcctgctttagaggagaagggaagggcggggtgaaactggatgcccagagttcttcccccagtgctcccctgagtgtatttgaaaagtatggccagtagttcacttgaagaatagatgtagtcccatttggccctgagagccatccttaatgatgggagatatatgtagcaagactagaaaaggaaagccaagccctttgtgtagaaagcagaccattcttagaacagagggcaacggggcatcggaagtctggtcacgctaagaagaccgaggctgagaaggaacaagccaggggaagcgtgaacaatgatgctctgctctgggctgccgctcgggcttctgtacaactgacctggtttctcagtactttgctgtctgggagtagcattggaatcaaggcctcctccctagtcagcctttgtatatactcatctatacgttgtatgcgttcatactttggaggagggatttcccacaagctttcgtttctgtgtacagccctggcattagacctactgtgtgtaagaatagattaagagccatacatatttgaaggaaacagttaaatgttttttggttgtggttgttgttgttgttgttttaaagaaaaaaatgtatatgctaagcacaatctttataagacctcttagccaacatacttgctctgtctacacttcggaacaagccttccatgtcagagtggctttgcaggcaggagaactgaggctgtttgaaaaggttaccacaggatggagaaaacagtgcagtcctggtttggattctcacatagcagggagcacaagttaaactcagccttttataggcacgtcccggacatcgggccagtatctattcaagtgtgtatgtgtgtgcatgcgtgtgtctatgcgtgtgggtgagttgtgttgggaaacttgccctgcatccctgagggtcctccttcaggacccaagacgtaacagcttctgtcaccgctcctgtctctccagtttccctgcatgtcgctcactgtctagaatttactcaaagccgccacagaggcttagcggagtgaagtgccgaaggacctctttatttggagtcctcctgtatttaacaacactcttatcgtagacccattcattagaccttatgtaatgctgccaatccagggaaacagatttaaagtgtaccccgtagacagggcccagaggttcccttgtccttgccctcccccacaccacccatgatcactgtccaacataaagggttcagtgtgtacgtggtcatgtgttgtccttacaggattcaggtatgttgccttcacggttttccccaccccctcctgccctttatcctttaggccgtgtggccatgaacctggaagaagtgatcgtttgcacttgagtgctacactcttgcacctttccaaagtaagctggtttggaggtcctgttgtcatgtacgagactgtcaccagttaccgcgctctgtttgaaacatgtctttgtattcctaatgacttcagttagagtaaggagaatagctgttaatatggatgtcaggtacttaaggggccacaccattgagaattttgtcttggatattcttgaaagtttatatttttataattttttttacatcagatgtcagatgtttctttcagttgcttgatgtttggaattattatgtggctttttttgtaaatattgaaatgtagcaataatgtcttttgaatattcctgagcccatgagtccctgaaaatattttttatatatacagtaactttatgtgtaaataatacgctgtgcaagtttaaacatgtcacgttacatgtgggttttttctgatatgttgtccaactgttgacagttctgaagaattctaataaaaatgtaaatatataaatcaaaaaaaaaaaaaaaaaaaaaaaaaa

SEQ ID NO: 11 - protein, 979 aa, Mus musculus
MRGARGAWDLLCVLLVLLRGQTATSQPSASPGEPSPPSIHPAQSELIVEAGDTLSLTCIDPDFVRWTFKTYFNEMVENKKNEWIQEKAEATRTGTYTCSNSNGLTSSIYVFVRDPAKLFLVGLPLFGKEDSDALVRCPLTDPQVSNYSLIECDGKSLPTDLTFVPNPKAGITIKNVKRAYHRLCVRCAAQRDGTWLHSDKFTLKVRAAIKAIPVVSVPETSHLLKKGDTFTVVCTIKDVSTSVNSMWLKMNPQPQHIAQVKHNSWHRGDFNYERQETLTISSARVDDSGVFMCYANNTFGSANVTTTLKVVEKGFINISPVKNTTVFVTDGENVDLVVEYEAYPKPEHQQWIYMNRTSANKGKDYVKSDNKSNIRYVNQLRLTRLKGTEGGTYTFLVSNSDASASVTFNVYVNTKPEILTYDRLINGMLQCVAEGFPEPTIDWYFCTGAEQRCTTPVSPVDVQVQNVSVSPFGKLVVQSSIDSSVFRHNGTVECKASNDVGKSSAFFNFAFKGNNKEQIQAHTLFTPLLIGFVVAAGAMGIIVMVLTYKYLQKPMYEVQWKVVEEINGNNYVYIDPTQLPYDHKWEFPRNRLSFGKTLGAGAFGKVVEATAYGLIKSDAAMTVAVKMLKPSAHLTEREALMSELKVLSYLGNHMNIVNLLGACTVGGPTLVITEYCCYGDLLNFLRRKRDSFIFSKQEEQAEAALYKNLLHSTEPSCDSSNEYMDMKPGVSYVVPTKTDKRRSARIDSYIERDVTPAIMEDDELALDLDDLLSFSYQVAKGMAFLASKNCIHRDLAARNILLTHGRITKICDFGLARDIRNDSNYVVKGNARLPVKWMAPESIFSCVYTFESDVWSYGIFLWELFSLGSSPYPGMPVDSKFYKMIKEGFRMVSPEHAPAEMYDVMKTCWDADPLKRPTFKQVVQLIEKQISDSTKHIYSNLANCNPNPENPVVVDHSVRVNSVGSSASSTQPLLVHEDA

SEQ ID NO: 12 - DNA, 4222 bp, Felis catus
  CDS (100)..(3036)
gcttgcaacaattaaaagacagagaaatctccgcgcgccgtgcacttgggcgagagcaggaacgtggaacggacctccgatcccagcgcagccaccgcgatgagaggcgctcgcggcgcctgggattttctctgcgtcctgctcctcctgctccgcgtccagacaggctcttctcaaccatctgcgagtccgggggaatggtctctaccgtccatccatccagcaacgtcagagttaatagtcagtgctggcgacgagattaggctgttgtgcaccgatccagggtttgtcaaatggacttttgagaccctgggccagtcgagtgagatcacacacaatgaatggatcacggagaaagcagaggccaccaacacgggcaattacacgtgcaccaacggaggcggcttaagcagttccatttacgtgtttgttagagatcccgcaaagcttttcctcgttgaccttcccttgtatgggaaagaagaccatgatacactggtccgctgtcctctgacagacccagaggtgaccaattactccctccgggggtgcgaggggaagcctcttcccaaggacttgactttcgtcaccgatcccaaggctggcatcacaatcaggaacgtgaagcgtgagtaccatcggctgtgcctgcattgctctgcggaccggaagggcaagtccgtgctgtcgaagaaattcaccctgaaagtgagggcagccatcagagctgtcccagttgtgtctgtgtccaaagcaagccatcttcttagggaaggggaagaattctccgtgatgtgcttgataaaagatgtgtctagttccgtggactcgatgtggatcaaggaaaacagcccgcaaactaatgcacagccacagagtaatagctggcaccaaggtgacttcaactttgtacgtcaggaaaggttgacgatcagctcagcaagagttaacgattctggagtgttcatgtgttatgccaataatacttttggatcggcaaatgtcacaacaaccttggaagtcgtagctaaaggattcattaatatcttccctatgatgaataccacaatattcgtgaatgatggcgagaatgtggatctgattgtcgaatatgaggcatatcccaagcctgagcaccaacggtgggtctatatgaacagaaccctcactgataaatgggaagattatcccaagtctgacaacgaaagtaatatcagatatgtgagtgaacttcatctaaccagattaaaagggaacgaaggaggcacttacacgtttcaagtgtccaattccgatgtcaattcttccgtgacattgaatgtttacgtgaacacaaaaccagaaatcctgactcatgaaagtctcgtgagtggcatactacagtgtttggtagccggattcccggagcccacagtagattggtatttttgtccaggagctgagcagagatgtcctgttcctgttgggccactggatgtgcagatgcaaaactcatctgtatcgccgtctggaaaactagtggttcaaagttccatcgattacagtgctttcaaacacaatggcacagtcgagtgtagggcttccaacaatgtgggcaagacttctgccttttttaactttgcatttaaaggtaacagcaaagaacaaatgcatcctcacaccctgttcacacctttgctgattggttttgtgatcgcagctggtatgatgtgtattatcgtgatgatacttacctacaaatatttacagaaacccatgtatgaagtgcagtggaaggttgtcgaggagataaatggaaacaattatgtttacatagacccaacacagcttccttacgatcacaaatgggagtttcccagaaacaggctgagttttgggaaaaccttgggtgccggtgccttcgggaaggtggttgaggccactgcatatggcctgattaagtcggatgcagccatgaccgttgctgttaagatgctcaaaccaagtgcccatttaaccgaacgagaagccctcatgtccgagctcaaagtcttgagttacctcggcaatcacatgaatattgtgaatcttctcggagcatgcaccgttggagggcccaccctggtcattactgagtattgttgctatggtgatcttttgaattttttgagaagaaaacgtgattcatttatttgctcaaagcaggaagatcatgcagaagtggcactttataagaaccttctgcagtcaaaggagtcttcctgcaacgatagtactaatgaatacatggacatgaaacccggagtttcttatgttgtgccaaccaaggcagacaaaaggagatctgccaggataggctcatacatagaaagagatgtgactcccgccatcatggaggacgatgagttggctctagacctggaggacttgctgagcttctcgtaccaggtggccaagggcatggcattcctcgcctcgaagaattgtattcacagagacttggctgctagaaatatcctccttactcatggtcgaatcacaaagatttgtgattttggtctagccagagacatcaagaatgattctaattatgtggtcaaaggaaacgctcggctacctgtgaagtggatggcacctgaaagcattttcaactgtgtgtacacatttgaaagtgatgtctggtcctatgggatttttctgtgggagctgttctctttaggaagcagcccctaccctggaatgccagtcgactctaagttctacaagatgatcaaggaagggttccgaatgctcagccctgagcacgcacctgctgaaatgtatgacataatgaagacttgctgggatgctgatcccctgaaaaggccaacattcaagcagatcgtgcagctaatcgagaagcagatttcagatagcaccaatcatatttattccaacttagcaaactgcagcccgaaccgggagcgccccacagcggtggaccattgtgtgcggatcaattctgtgggcagcagcacatcttctacccaacctctgctggtccacgaggatgcctgaagcaggaggagcgccggggtctccccagcgagaacgatccctcttcttttggttcctatcctggttatttcgttcccccttcaactcgcatcctgttccagggtagaggacaccccgctgtaatcccgtctttacaagcacactttagtggccaatgatctttgtcatcagccaccacgctattgtaagggttcgaactgcacatatccccgataacgaggcagcccccattaacgaaaacaaaacaaaacaaaaacaaaatgcagacttggagcaagggagggtgggatgggccacacaccctggggcctttccaaggcttctccactttctgtttgaagagcagagttgatagtttatttgaataaatggcagtagtcgcctttgggcctcagaaccatccataatgatacgatgacgcagcaagattagaagctgaaacctgatctcttgatgtggaaaatggaatgttattagaacaaagggcagaagtctatgaatatctgggcttaagaaatctaggatttcgtgctgaggaatgagacataggccatggaaaaatgctccccgagcaggaacataagactcgctgctgggcatgagcctttgtactactgacctggtctgtaaatagagttctctgttagggcactgaatcggagagaaggcctccccagccagcatttgtatatactcatctataaattgtacatgttcatatattgaggagagaaaacccacaagatgtagtttctggatatgaccctggctcaagtctgctgtgtgtagaaatagattaagggccagacaaatttgaaggaaacagtgcttttttttttttttttaagaaaaaaaaaaccataattgccaagcacaatcttaacaaagatctccttttgtagcctatgaacttgctctgcagatgctccagaacaagcctaccagcttcagaatggcctcctcaataaggaatgcacgtttgatcctgtcacgaacacacttagcacacatggaaccaccgtaggccctgctgacgtgctttttcgttttggacagcctcataagaactttaggtctcacagcacgaactcctcgaagtcggcctgggcacacgccacatgcagattttggtgctttcccaaccttcttggtataaaggtaaacgattctattacctggggttcgg

SEQ ID NO: 13 - protein, 978 aa, Felis catus
MRGARGAWDFLCVLLLLLRVQTGSSQPSASPGEWSLPSIHPATSELIVSAGDEIRLLCTDPGFVKWTFETLGQSSEITHNEWITEKAEATNTGNYTCTNGGGLSSSIYVFVRDPAKLFLVDLPLYGKEDHDTLVRCPLTDPEVTNYSLRGCEGKPLPKDLTFVTDPKAGITIRNVKREYHRLCLHCSADRKGKSVLSKKFTLKVRAAIRAVPVVSVSKASHLLREGEEFSVMCLIKDVSSSVDSMWIKENSPQTNAQPQSNSWHQGDFNFVRQERLTISSARVNDSGVFMCYANNTFGSANVTTTLEVVAKGFINIFPMMNTTIFVNDGENVDLIVEYEAYPKPEHQRWVYMNRTLTDKWEDYPKSDNESNIRYVSELHLTRLKGNEGGTYTFQVSNSDVNSSVTLNVYVNTKPEILTHESLVSGILQCLVAGFPEPTVDWYFCPGAEQRCPVPVGPLDVQMQNSSVSPSGKLVVQSSIDYSAFKHNGTVECRASNNVGKTSAFFNFAFKGNSKEQMHPHTLFTPLLIGFVIAAGMMCIIVMILTYKYLQKPMYEVQWKVVEEINGNNYVYIDPTQLPYDHKWEFPRNRLSFGKTLGAGAFGKVVEATAYGLIKSDAAMTVAVKMLKPSAHLTEREALMSELKVLSYLGNHMNIVNLLGACTVGGPTLVITEYCCYGDLLNFLRRKRDSFICSKQEDHAEVALYKNLLQSKESSCNDSTNEYMDMKPGVSYVVPTKADKRRSARIGSYIERDVTPAIMEDDELALDLEDLLSFSYQVAKGMAFLASKNCIHRDLAARNILLTHGRITKICDFGLARDIKNDSNYVVKGNARLPVKWMAPESIFNCVYTFESDVWSYGIFLWELFSLGSSPYPGMPVDSKFYKMIKEGFRMLSPEHAPAEMYDIMKTCWDADPLKRPTFKQIVQLIEKQISDSTNHIYSNLANCSPNRERPTAVDHCVRINSVGSSTSSTQPLLVHEDA

SEQ ID NO: 14 - DNA, 3154 bp, Canis familiaris
  CDS (29)..(2956)
gagctcagagtctatcgcagccaccgcgatgagaggcgctcgcggcgcctgggattttctctgcgtcctgctcctgctgctgctgctcggcgtccggacaggctcttctcaaccatctgtgagtccaggggaaccgtctctcccatccatccatccagcaaaatcagagttaatagtcagtgtcggcgacgagcttaggctgtcctgcaccgacccaggatttgtcaagtggacttttgagaccctgggtcaactgaatgagaacacacacaacgaatggatcacagagaaggcagaggctggccacacgggcaattacacgtgcaccaacagagatggcttgagcaggtccatttatgtgtttgtcagagatcctgcaaagcttttcctcgttgaccttcccttgtatgggaaagaaggcaatgatacgctggtccgctgccctctgacggacccagaagtgaccaattactccctcagggggtgcgaggggaagcctcttcccaaggacttgacgttcgtcgctgatcccaaagctggcatcacgatcagaaacgtgaagcgcgagtatcatcggctctgcttgcactgctctgcggaccagaagggcaggacggtgctgtccaagaaattcaccctgaaagtgagggcagccatcagagctgtaccagttgtgtcagtatccaaaacaagctctctcctgaaggaaggggaagccttctctgtgatgtgctttataaaagatgtgtctagtttcgtggactcgatgtggataaaggagaacagccagcagactaatgcacagacacagagtaatagctggcatcatggtgacttcaattttgaacgtcaggaaaagttgattatcagctcagcaagagttaatgattctggagtgttcatgtgttacgccaataatacttttggatcagcaaatgtcacaacaaccttggaagtagtagataaaggattcattaatatcttccccatgatgagtactacaatatttgtaaatgatggacagaatgtggatctgattgttgaatatgaggcatatcccaaaccggagcaccagcagtggatctatatgaacagaaccttcactgataaatgggaagattatcccaagtctgacaatgaaagtaatatcagatatgtgagtgaacttcatctaaccagattaaaagggaacgaaggaggcacttacacatttcaagtgtccaattccgatgtcaattcttcggtgacatttaatgtttatgtgaacacaaaaccagaaatcctgactcatgaaagtctcacgaatggcatgctccagtgtgtggttgcaggattcccagagcccgcagtaggttggtatttctgtccaggagctgagcagagatgttctgtccctattgggccaatggatgtgcagatgcaaaactcgtctctgtcaccgtctggaaaactagtggttcagagttccatcgattatagtgccttcaagcacaatggcacagtcgagtgtagggcttacaacaatgtaggcaggagttctgccttttttaactttgcatttaaagaacaaatccatccccacaccctgttcacacctttgctgattggctttgtgatcgcagctggaatgatgtgcattatcgtgatgattcttacctacaagtatctacagaaacccatgtatgaagtacagtggaaggttgttgaggagatcaatggaaacaattatgtttacatagacccaacacagcttccttacgatcacaaatgggagtttcccagaaacaggctgagctttgggaaaactttgggtgctggtgccttcgggaaagtggttgaagccaccgcatatggcctgattaagtcggatgcggccatgactgttgccgttaagatgctcaaaccaagtgcccatttaaccgaacgagaagccctaatgtctgagctcaaagtcttgagttacctcggtaatcatatgaatattgtgaatcttcttggagcgtgcaccgttggagggcccaccttggtcattacagaatattgttgctatggtgatcttttgaattttttgcgaaggaaacgtgattcatttatttgctcaaagcaggaagatcacggagaagtggcactttataagaaccttctgcattcaaaggagtcttcctgcagtgacagtactaatgaatacatggacatgaaacccggcgtttcttacgttgtgccaaccaaggcagacaaaaggagatctgcgagaataggctcatacatagaaagggatgtgactcctgccatcatggaagatgatgagttggctctagatctagaggacttgctgagcttttcttaccaggtggccaagggtatggcattcctggcctcgaagaattgtattcacagagacttggctgctagaaatatcctccttactcatggtcgaatcacaaagatttgtgattttggtctagccagagacatcaagaatgattctaattatgtggtcaaaggaaacgctcggctacctgtgaagtggatggcccctgagagcattttcaactgtgtgtacacatttgaaagtgatgtctggtcctatgggatttttctgtgggagctcttctctttaggaagcagcccctaccctgggatgccagtcgattcaaagttctacaagatgatcaaggaagggttccggatgctcagccctgagcatgcacctgctgaaatgtatgacatcatgaagacgtgctgggatgctgatcccctgaaaaggccgacgttcaagcagatcgtgcagctaattgagaagcagatttcagatagcaccaatcatatttattccaacctcgcgaactgcagccccaacccagagcgccccgtggtggaccattccgtgcggatcaattccgtgggcagcagcgcgtcttccacccagcctctgctggtacacgaagatgtgtgaagcaggaggagtgccgggggtctccccaacaagagcgatccctgttcttttggttcctatactggttattctgtcctccttcggcttgcatcctattccagggtagcggacacccctctgtccctccctctttacgagcacaccctaattagtggccagtgacttttgtcatcagccaccatcctattgcaaaggttc

SEQ ID NO: 15 - protein, 975 aa, Canis familiaris
MRGARGAWDFLCVLLLLLLLGVRTGSSQPSVSPGEPSLPSIHPAKSELIVSVGDELRLSCTDPGFVKWTFETLGQLNENTHNEWITEKAEAGHTGNYTCTNRDGLSRSIYVFVRDPAKLFLVDLPLYGKEGNDTLVRCPLTDPEVTNYSLRGCEGKPLPKDLTFVADPKAGITIRNVKREYHRLCLHCSADQKGRTVLSKKFTLKVRAAIRAVPVVSVSKTSSLLKEGEAFSVMCFIKDVSSFVDSMWIKENSQQTNAQTQSNSWHHGDFNFERQEKLIISSARVNDSGVFMCYANNTFGSANVTTTLEVVDKGFINIFPMMSTTIFVNDGQNVDLIVEYEAYPKPEHQQWIYMNRTFTDKWEDYPKSDNESNIRYVSELHLTRLKGNEGGTYTFQVSNSDVNSSVTFNVYVNTKPEILTHESLTNGMLQCVVAGFPEPAVGWYFCPGAEQRCSVPIGPMDVQMQNSSLSPSGKLVVQSSIDYSAFKHNGTVECRAYNNVGRSSAFFNFAFKEQIHPHTLFTPLLIGFVIAAGMMCIIVMILTYKYLQKPMYEVQWKVVEEINGNNYVYIDPTQLPYDHKWEFPRNRLSFGKTLGAGAFGKVVEATAYGLIKSDAAMTVAVKMLKPSAHLTEREALMSELKVLSYLGNHMNIVNLLGACTVGGPTLVITEYCCYGDLLNFLRRKRDSFICSKQEDHGEVALYKNLLHSKESSCSDSTNEYMDMKPGVSYVVPTKADKRRSARIGSYIERDVTPAIMEDDELALDLEDLLSFSYQVAKGMAFLASKNCIHRDLAARNILLTHGRITKICDFGLARDIKNDSNYVVKGNARLPVKWMAPESIFNCVYTFESDVWSYGIFLWELFSLGSSPYPGMPVDSKFYKMIKEGFRMLSPEHAPAEMYDIMKTCWDADPLKRPTFKQIVQLIEKQISDSTNHIYSNLANCSPNPERPVVDHSVRINSVGSSASSTQPLLVHEDV

SEQ ID NO: 16 - DNA, 3010 bp, Equus caballus
  CDS (92)..(3010)
cggctctgggggctcggctttgccgcgctcggtgcacttgggcgagagcaggaacgtggaacggagctccgatcccagcgcagccaccgcaatgagaggcgctcgcggcgcctgggattttctctgcgtcctgcttctcctgttccgcgtccagacaggctcttctcaaccatctgtgagtccaggggaactgtctccaccatccatccatccagcaaaatcagagttaatcgtcagtgttggcgacgagattaggctgttatgcgctgatccaggctttgtcaaatggacttttgagacctggggtcagttgagtgagaacacacacaaagaatgggtcacggagaaagcagaggccacaaacacgggcagttacacatgcaccaatgaaggcggcctaagcagttccatttatgtgtttgttagagatcctgcaaagcttttcctctttgatccttccttgtatgggaaagaaggcagtgatacgctggtccgctgtcctctgacagacccagaggtgaccaattactccctcatggcgtgcgaggggaaatctcttcccaaggacttgacgttcgtcgctgatcccaaggccggcatcacgatcagaaacgtgaagcgcgagtatcatcgactgtgcttgcgctgctctgcagacaaggatggcaagtcagtgctgtcgaataagttcaccctgaaagtgagggcagccatcagagctgtgccagttgtgtctgtctccaaagcaagctatcttcttagggagggggaagaattttcagtgacgtgcttgataaaagatgtgtctagttccgtggactcaatgtggataagggaaaacagccggactaaagaacaggtaaagagtagtagctcacatcagggtgacttcaattttgtacgtcaggaaagactgactatcagcccagcaagagttaacgattctggagtgttcatgtgttacgccaataatacttttggatcagcaaatgtcacaacaaccttggaagtagtagataaagggttcattaatgtcttccctatgatgaatactaccgtatttgtgaacgatggagagaatgtagatctgattgttgaatatgaatcctaccccaaacctgaacaccagcagtggatatatatgaacaggacctccactgataagtgggaagattatcccaagtctgagaacgaaagtaatatcagatatgtgagcgaacttcatctgactagattaaaaggcaccgaaggaggcacttacacgtttctagtgtccaattctgatgtcgattcttccgtgacatttaatgtttacgtgaacacaaaaccagaaatcctgactcgtgacaggctcatgaatggcatgctccagtgtgtggcagcaggattcccagagcccacaatagattggtatttttgtccaggaactgagcagagatgttccattcctgtggggccagtggatgtgaagatacaaaactcatccgtgtcaccgtttggaaaactcgtggttcaaagctccatcgattacagtgcattcaagcacaacggcacggtcgagtgtagggcttacaatgatgtgggcaagagttcggccttttttaactttgcatttaaagagcaaatccatccccacactctgttcacgcctttgctgattggtttcgtggtcgccgctggcatgatgtgcgtcatcgtgatggttcttacctacaaatatttacagaaacccatgtatgaagtacagtggaaggttgttgaggagataaatggaaacaattatgtgtacatagacccaacgcaacttccttatgatcacaaatgggagtttcccagaaacagactgagttttgggaaaaccttgggtgctggcgccttcggaaaggttgttgaggccactgcctacggcttaattaagtcggatgcggccatgactgttgctgtgaagatgctcaagccaagcgctcatttaacggaacgagaagccctaatgtctgaactcaaagtcttgagttaccttggtaatcacatgaatattgtgaatcttctcggagcatgcaccgttggagggcccaccctggtcattacggaatattgttgctatggtgatcttctgaattttttgagaagaaaacatgattcatttatttgctcaaagcaggaagatcacgcagaagcagcactttataagaaccttctgcattcaaaggagtcctcctgcaatgatagtactaatgagtacatggacatgaaacctggagtttcttatgtcgtacccaccaagacagacaagaggagagctgcgagaataggctcgtacatagaaagagacgtggctccgtccatcatggaagatgacgagctggccctagacctggaagacctgctcagcttttcttaccaggtggcaaagggcatggcgttccttgcctcaaagaactgtattcatagggacttggcagccagaaatatcctccttactcatggtcgaatcacaaagatttgtgattttggtctagccagagacatcaagaatgattctaattatgtggtcaaaggaaatgctcggctacctgtgaaatggatggcacctgaaagcattttcaactgtgtgtacacatttgaaagtgatgtctggtcctatgggatttttctgtgggagttgttctctttaggaagcagcccctaccctggaatgccagtcgattctaagttctacaagatgatcaaggaaggtttccgaatgctcagccctgagcatgcacctgctgaaatgtatgacataatgaagacttgctgggatgctgatcccctgaaaaggccaacattcaagcagatcgtgcagctaattgagaagcagatttcagatagcaccaatcatatttattccaacttagcgaactgcagcccccgccaggagaactccgcggtggaccattctgtgcggatcaattctgtcggcagcagcgcttcctccacccaacctctgctggtccacgaagatgtctga

SEQ ID NO: 17 - protein, 972 aa, Equus caballus
MRGARGAWDFLCVLLLLFRVQTGSSQPSVSPGELSPPSIHPAKSELIVSVGDEIRLLCADPGFVKWTFETWGQLSENTHKEWVTEKAEATNTGSYTCTNEGGLSSSIYVFVRDPAKLFLFDPSLYGKEGSDTLVRCPLTDPEVTNYSLMACEGKSLPKDLTFVADPKAGITIRNVKREYHRLCLRCSADKDGKSVLSNKFTLKVRAAIRAVPVVSVSKASYLLREGEEFSVTCLIKDVSSSVDSMWIRENSRTKEQVKSSSSHQGDFNFVRQERLTISPARVNDSGVFMCYANNTFGSANVTTTLEVVDKGFINVFPMMNTTVFVNDGENVDLIVEYESYPKPEHQQWIYMNRTSTDKWEDYPKSENESNIRYVSELHLTRLKGTEGGTYTFLVSNSDVDSSVTFNVYVNTKPEILTRDRLMNGMLQCVAAGFPEPTIDWYFCPGTEQRCSIPVGPVDVKIQNSSVSPFGKLVVQSSIDYSAFKHNGTVECRAYNDVGKSSAFFNFAFKEQIHPHTLFTPLLIGFVVAAGMMCVIVMVLTYKYLQKPMYEVQWKVVEEINGNNYVYIDPTQLPYDHKWEFPRNRLSFGKTLGAGAFGKVVEATAYGLIKSDAAMTVAVKMLKPSAHLTEREALMSELKVLSYLGNHMNIVNLLGACTVGGPTLVITEYCCYGDLLNFLRRKHDSFICSKQEDHAEAALYKNLLHSKESSCNDSTNEYMDMKPGVSYVVPTKTDKRRAARIGSYIERDVAPSIMEDDELALDLEDLLSFSYQVAKGMAFLASKNCIHRDLAARNILLTHGRITKICDFGLARDIKNDSNYVVKGNARLPVKWMAPESIFNCVYTFESDVWSYGIFLWELFSLGSSPYPGMPVDSKFYKMIKEGFRMLSPEHAPAEMYDIMKTCWDADPLKRPTFKQIVQLIEKQISDSTNHIYSNLANCSPRQENSAVDHSVRINSVGSSASSTQPLLVHEDV

SEQ ID NO: 18 - DNA, 82788 bp, Homo sapiens
tctgggggctcggctttgccgcgctcgctgcacttgggcgagagctggaacgtggaccagagctcggatcccatcgcagctaccgcgatgagaggcgctcgcggcgcctgggattttctctgcgttctgctcctactgcttcgcgtccagacaggtgggacaccgcggctggcaccccgaccgtgcgactactcggcgaagcctgtgcctgggagggtggtacccgccagggtgcatccggagagaggactgcgggccctcagtgcccgtgcgttccagcctccggggagactccaggtggccctcggactctccggcgccctgcctcgctcacctgcgcgaggagaccccagctgctggtggtgggggacgcgaatccggggttcttcgggaatggggacagcaagagggggttaggcgtgagcgaggctgcaggctccgtgcgagtttggggtggcttttgtgccgacgttgcgcggggggcggaggcggggggctcaggggtttgcaccgagcgccttctcttgccgtgcgaggcgcggccgcagcttccttttgttaaaagttgcgtgtgtgtgaccggcgcccgggaggacctgcctgcaggttctccgccgcgctgagggcaaagttagagagccctttctctgctctgcggctactgccttccaaccgcaggcgctctttgtgcccagagctggggaccgacccgctgccgcctctgctcgcggcgccacccgtggagaccaatcgaaggctgcggcgtttccccgcctccgggttaggcttttgcgctgggagtgcgcggcgtggggctgttgtggggccggactcccgcgagcctggaggtggtggcgacagggacaacttgggcagggcgtgtggaaagcagccgctaggttgcagactttttgctttcgtacatcccgtgctcgcccctttctgccgcggcgccgtttcattcctgccgcgcgccccggggcggctggaggctgtgtttgccgcctgctccgggaaggcaagggacagcgtgctgggactctgcgttccctgactccaaccgcctagcacgccggccagagtgcccggcctgcctggcgggttctgaaagcccctagttcccggtgtctgcgacctgtattcgcaggtcctgttttcttcggaaatttttgagattcgtgaccgcccgcctccccgcccccgggacttctatacttcagggctgcctgggggtggggtgggagatggcgtggaactttctgcaaatcctactcagttcttaaagctataacagaaatccaggtatatccgcgcgggaactgggtcttaggtgaaggatttgcaggttgctggagccccttggtcagattcctgcctcccgttcccttttttccaggtgtcgctggtgcgggcgagtgcaggtcgcccagctcacccctgaagccctgctatctcccaggtcattttttaaaacaaacctttaaggttaccctgatgatgtaaggatagaaagtgagtcttagctggaatcaagcgcttgaaaggaagcggcgcaatgaacggttttgagactgtcgactaccggtcagtttctctataaagtctccaggcgcagtctgcagcgtcctggacttgtaactattgtgagggctttcctgtggggggcagagaggccttgcatctggacccctgtgcagcaggaggggtcagcaggggtcacgagggagtgttcggattctctggaggatttgatcacctagcttaaaacaacacatctggtctttatgtttttgtgccttgacctttttaatatcagttaagctatgtgaactagaacctagtaggagactagaaagaccacatcgaatatctcccttttaaaaaattaaaagaatcaatggttttcttctccccaatagatttttggcaaagggaattttaaggtctgtctcctgggggggcagtgtggtgtaacgacaaagccttgctctgtcccctgggttctcggtttctctgccatttcttggctgcgtgcccttggccaggttgcttagggcaggttgcttaaattctgggaaacgcagtgtcctccagagtacaaggaggcatctgcatcatgaaggatcctttgggtccagaattctcctccaatgttctgagtgtagactcagcactctttttaactattcccctggcccctgtctgcctctttgaaattcctctgcctctcctgctcacagggaagtcatagagtatgggtgcatctgaccggtctgcccctgactgaagcaaggagctgtggcttatgcttactgcccttcaattcccatatattcctctgcattgccctttgagggcccccgccccccaagtattacagctcctgtgcctaacaggatgaacctgctaggaatagtgaatcataccttccccgtttcgttcctgcaggtgtgaggctggagtcattctcagcagctggacacaaggcactctaaattattatcctgctggaaataagagaccccagataattcatttatccctattctgttttttcccccactcattcccattttttttctcatgactctgtaaatcatgtaatgctatgcatttatagcatgctttctaatgggccttaagtttcgtatgacatgtgtggtgtacatagttgttgctcttcagttggaaactgtgtgccaggccttttgcttggggctttacctatttctagtagtctcaatgagcctaggaagtagtactattattacccctaacattttacagctggagaaactggctaaggataagccctaaatcatcagtggtgaagcctgatgagattggctgcatgtgcccagctctatagccattcacatgattcaccagaatctgttgtaagactcattcaaaaatatttaatgagtttttactatgtgccagggattgttggaagttctgggaatacaggatggccaatgtcactaccttcccaattttggtgaaaaatatttagaattgcgtgtcttatgaaagcggattatttgtggagggaggattaattaaattttagcttggaggaagggctgtaggcatttgaccctgtggtatgttggcttagttgttagctatctcattccagttagcgtccctcagaaatgaaggtaagctgtttctaaaaggatgatgcaagccagttaaaaatccatctcccactccaaaacataaaaatggtcttgtgcataggtgtgaaagagaacacccccaataatggctgatgtcattggctatttaccctggatagcatggtgagaaataatgacaatctaccatccaaagccattttttctcccaaaagaaattctcatcagaaatgtgccaagtattctgcgggcttcccttggagaacatttatgtacagatgttgtggtggtgatgaattttgctgctgttgttgacagcccttcgaagttacccttagggttttgactcatttcctcaagtctcttccagctgattaaagaaggacacgaggaaatgaacctcggtgtctctagcggaattctcagagctggcctgcagtgtggggaccccttcaaggtagtggtcaaggctgtggcagctttttcttcagaatgaatgtagtttaagagttggcaggctaggatgtgggaaatgctttcttttgctgcattaatgtgcggtaacttttaaaagttgagattgaatgacatttgcaggaatccaaatatgcaaatttcatgtgcagttttggtaacttgaatagatattgccacagctataagtccggattgaagaaggcctggggaagagttagaggaggtaaaagtttgcctggagggcaaatccagtgtaaatctttgttgtacttagagaggaattgagttgagtcatagagaggaattgagttgagtcggcttggcccagcagctctgatttctgacattttttggatgtgatcatacagctcatcttttgacctaagactcttaataagtaaagagcagttgtaatctgatagcccgaggagacatgttttctttggcctacatgatgctttttagaaaacattgaggcgatattaaacaatctagagattttttttaaatcaagatctctatttctgtctcctctttaagaattgaaggtcatggcccctgtagatgaggcctgtgctcttcaggttgcattaggctctagggctttatcctgccatcccttaggcattccccactgggccctggtgagtgcaggaatccaaatatgcccctgggaccaggcagatgacaagtgggaggagacaggccggcctaccttgtgttggtctgatggcttcatgactgacagcttgatggccttagagcaaattgtttaacctttttgagctttcattgtccatcctagttttgccacttattagctctgtgactttcggcagattacttaacctctctgtgccagtaaatgtgttgctacatgtaaaacttttagagtggtgcctcatagtacaggctcaatatgtgttagccataattatcgtctgtaaaacaggaattattattgtccctaaaatgggaataatgcctactcttttaagatgattgccctaaagattagaaaggcattttttttgtttgttttaaagacagtatcttgccctgttgcccaggctggagtgcaatggcgcaatctcgtctcactgcaacctccacctcctgggttcaagcgattctcctgcctcagcctcctgagtagctgggattacaggcacccgccaccatgctcggctaatttttgtacttttagtagagatggggtttcaccatgttggcctggctggtctcgaacccctgacctcaggtgatctacctgcctcggcctcccaaagtgctaggattacaggcatgagccaccatgcctggccgacagttttaaaaataagctttaatttttttggtcttgttttatttagcttttgataagagttaggaaatcactagtcctagagattgaatagatcttgaactttttttttctccaggggggaaaaaaaaaaactacacatcttgtaagattctccaacataacatttgtgtctggtacttttcccattcatcttatgttttagctttcatgcttacattttggttatgacacacttttgttagacatcttcccatgcatacctttctgacaggttttcaacatttttgcaaaatttaaggtttaagccaaattattattcaggacatgtggcatcagttaattacgagcttgggctctgaaattgacacgctggatttttattccagttctgcctcttccctgctgtgtgctctgggacaagacacttaacctctccttaagcttcatttcctcatctgtaaaatggagatgatgacatagggcccctgcgaggattaaatgagattctgcatgtaatatgcttagcatagtgccccgcatagaggaagtgtgtggactccactatcaggctgattttcttatgttcccctttcagctttgcctcttagaaaaaaattgaaaacgtgtaaacagaatatgtagagtggtttttttttttcgtattaagatgaagttgttaattagtggtaatgcatgtttatctgcttggctctttgtttagccgtattcttgggttactttccaccaaaagagatacaaatttcttgataaaagtttaggttgggggaatgtctgcaaatggccattttctgtaggtgaataagtacatgtagttcacctagggtccatgaaagcagtcaaggagcttttccatgactgctttcactaggagttcaaggaccaagctgaacttgtccattgccccaggctagacacagcggttagtgttcagtaagtattagtttaacatcttttctattctccagcacttacactaagctttgaacataaatggtcagtaaacattttggattcagtttaacaaaggcttatcaatccccatgccttggtcctacgttacaggctgggggtggaggagggccagggcaagagcacagcccctgattcgaagtagaatttggttttcttaagtgtaaagtgctctgggcaggattttcaaggagatgagcttaaatcttgatgggcaggtaatagagatcaggaatcagtaagagcatccacataggagataatatttgagattaatttctgaaccttaaaggaagagggcagtgtagttgtggcttcagctgaaaaaaactacagtacaaggaacaaggcattaggatcttacttcaggattatcaaacctttctattggtatgatggctgggggtagggaattggctgggaaggtaagactcctcttactagcctcaaggagcatggagggaatgtgtatttagtgctgagtttggtctaggttatgaagaatgctttgaagtcaaggctaaggtggacttgacccaggagtggccccccaggctttgcatactagtccagggctgcctgttccaccattctgtccaattagacatactccccagcctgttccaatagtctgacgaagcgagaggccaagccctgccttaaaacttggacactcccttgctgtgggcaaccaagactaagggagagtctgtttttattatttatttatttatttatttatttatttatttatttatttatgagacagggtcttgctctgttgccaggctggagtgcagtggcacgatcatagttcaccgcagcctccacctcctgaactcaagtgatcctctcatctcagcctcctgagtagctgggaccccaggcgtgtgccaccacaccggctaatttttttatttctatttttgtagagaatagtctcgaacttatgagctcaagcgatcccccagcctcagcctcccaaaatgctggggttacagatgtaagccaccacacctggcctgttttttttttttttaatagtaaaacatacataaaatgaaatttactaccttaatcatctttaaatgtatatttcaatagtgttaagtacattcatactgttgaacactttcatcttgcaaaactgaaattctatacccattgaagagcagctcccctctccttcccccagcttctggcaaccaccattctactttctgtctctgaatttgactattccaggtaactcgcaaatgcagaaccatactgaatttgtctgttttttgactggtttatttcacataccgtaacatcctcaaggttcacccctattgtagtataagtcagaattttcttcctttttaagactgaaaaatattccattgtatgtatagaccacattctgtttacctgttcctcctttgatggacatttgggttgcaaacaatgctgtaatgaacatttgcatgtaagtatctaagggagatttttcgtggagactatttaggagggttaaactcatggctgcgagctacatgttggggagctgggcagaagatgggctctttagattatctctgagtgaaggggtagtggacctgggtattagggtacatgctttggaaagaaagcgcccttaagagacacgaggaggataaaggtgcaggtcttctctcattcggcgtatttatgggcaccttctgtgtgtcaggcactgatgagattgaggggaaggagaactggaattatcatgggtgtaggtaactgggagtattgttgatactatggaattagtggaaataaagccaagaggaggggtggcctatttgagggagagaatatgatgttggactctgctgggtttattcattgattatttgtgagctgcattttcttgaaactcaatttcacagacatggagggaagacgtcaatgaaatcttagggtcaggtccctgtaagaaataaaactaaaccccaaagtcacaaaacatggctctataatattacggtagcattggggattataaagaatggtatgttaactgtgaaccagtcttatggtgaaaagtaagttttcatgaaaaggagtgtatactaggaagagaatcctgtattcttctctgcattaggccatgtttaaggtatgttttttgtttttctcagaataaaatggccatactgggtatagaggaggacatagaattgacgaaagctttgggaaataggtcctttgaaagcaacttaaagaaattggatttattaagcctggagaagataaggtgagggaaggtttagtgaatgacagtcttcaaatatttttagtgtgtgagtgaaaagtagaacaaaatgagagtcatttaaattgccccagaaggaaattgaaaatttttttgtttttgttttttgttttttttgttttgttttgttttgagacagagtctcactctgtcgccaggctggagtgcagtggtgtgatctccgctcactgcagcctccacctcccgggttcaagtgattctcctgcctcagcctcccgagtagctgggactacaggcgcacgccaccatgcccagctaatttttgtatttttagtagagacggggtttcaccatgttggccaggatggtcttgatctcttgacctcgtgatccacacacctcggcctcccaaagtgctgggattacaggcgtgagccactgcacccggcaatttttttttttaagggaaaattctttcattagaagggttggcagagactttattcagttatagggcctttgctggagctgtgaagaaaaccaagtaattgtcattttgaaatggttcttaggtcctccccaactcagttggtttgatggccctttaagggcctgcctgaaatcgtttgggaataattcagaaatgggaaaataaccaaccgtttttctttcctcactgccttggctgtggggcagagtttctcataaatgctgaatagactctaacataatccactactatagtcacaatttcggctatattgataacagcaagtaaagaacccacagcctaaaaatgggttattgatctgttaggtgtggcgggatctaaacacagaagaaattgtacggtgtggtagcttaaactgagtgtcaaaataagacaaaaggaagctcaaggtctagagaaatccataatctatcatttagccctaccctaagaatcgctgtgctataacgcagcatgtaggcagaaagtctgtaagcatgaaggacggctcccaaagtccttttctcttgattactcaggggtggattggttacccaccactctgactaccctttccatctgtcctttccctctggtcattttgtggtcatggctcagtggcacgtttgagatcagcccatggtccagtggggaaggtggtagaaatgacattgcaattcagcagctactgcttgataacattttattaatacctgtcactttgaaattgatgagtcttaagatgggatccttgcctttaaggatcctaggacctataggaagatggtcctgggtaggcgccaatgttacaggatttgtaataagatttaagttaacaattccagtcctattcattaccattggtttggaggacataggcatcacttcttgaatggccaattgaaaggaagataggggcctgaattaaatcttaaaagagtggggtggaatttggtcaagatgtgaagaggaaaagcaaaggttagagttagccggaaggctctgctcccgccgacagaacgtctgtagagagtagcggaagatgagatgggataatttttagggcacctggatttttattcttcaataattgaagtctttcctgcagtgctatatgtgatgagatttttgtaaatgtaatctggctaagtagttgcctattcagagaaataacttttaaaaatggaaaagtatggatatcacttttgcatgtattacctgtgttgtatgttcgatgcacatccagtatggatatgtattttgagttgtttttaagtccaaggctaattctgctcccttctccctaccgaccttccccactcctagccaagattagagattttgtgggctcaacttctgattgtggcagtagatgacctttcatttgcttattaacatattttaaatatttagcaaaataatacaccttgtttatgtcagtttattcattgaagcaaagatagcaacaaacaagcctgcaaaccttgataaggagcctgtgtggtttggaacatcttgagattcttccctggatccccccgagtcctgttttagaaacctattaggggcacactggtggctgccctccccaacccagggagtcttcggagggaggaggaggtggctgtttgtggtgggcagaactctgtcacttaaggaagaggcgtgtctgatagcacttgccagtagtgaatgcctcattcttgaccaagtagaaaaaagataagagggaaaatgaaaaaggtgaaacggttctcctttaccttgtattttaaattgcttagtgaggcaaaatatccaccttcatttgggtttaccccaggtaactcatttcacagggtgttagaacatttcagagggtgttagaaaattccaaacaatggccgggactcccagtaatttaaatataatggcctatgcgggttcttaagcagaggaattagttaacagagttagaacaaaggagagcattatcacaaagagctctggaagttaatgtgtctctttttattggaaaagaagtatttctagaacaggattcaattggcttctggggaaaatatttactggagattttagaagtgtgaaaggtggcaggagacgttggctgtctgttattctacttggctagtgcacacttaaaaataaaacaagactatgttaaaaagatcttgagaattctacttggaaagactgaagtaaagatagtacaggtacttttcaaaggatataaattttggcttataaagtattttaaatgcaattccatcccaactttcacaatgcagacttcctttttagtggctgatgttgaaagaaggtaccttagaaagattttccatttaagaaatggttgatattgatatttatttggctgataaaacaccacaaggactggtttttagaattttttgtcattgttaaatcaagccaggattcttaacctaaaatatgttaggatagctaatgaaaatacttaattggaatgtttaaatgtttctctacttattttagtatagtctgtatatgtgcagctgggaaatagtatatacgtttttagccgcaccaaaaagcatcactttgataaaagaggaccccccccccttgcttttttaaaataaaccagcatatgtagaagggtttgtgagtttttttagtagatctgaatgtgttgcccaatttacattccagcattttcaagggatattatttaacatgatcatcttggtttcagaaccactgcctttcaaagagtctggcccagagcattgtgtgtgcctgcgagtgaggtgggtcccccacggggtctagtggctttgcgccatactggccactgggaacaccagctctggcggtacagcaggggtacttaacattacagctttattcttcattcttttgatcccttctgtatctttaatctgcccttataccagaaatccatagatttattcacaaataattattgaagcatcggaggtgtagtagtgaacataccaggcaaaagtctttgtcctctcttggggcttatgttttagtgaattatttttctctccaggagagagaaaagtccaggagtccagaaaggaaaaaaaaaaaaaaagaaagatgtaatttgaggggctatcatagaaagcagtttaatttagacttatttcagttccatattgtggttagttaaggaagaaagagaaaagaaaggtgatgcagagggtcagagggtaccagttcaaaaaagaggaaagccaaagaaagcaactagaacaataggaaaaggagattcaggggctgggggagatgggcaggagtggagtcagggaagctttgtgaggtgcttttcactacctgccaccagtgctgccctccagagggctgagcaccagctccatcccaccatgtccctgccccagtttctgtaacttcagagcagcaggcctcttgattcaacaggtgtttttgatggaggatttacccaagaggattgactagtgataggtgtcttcactttcaggacctttggagcctttaatgtgctttagtctgcaggtttggaactgtttgttctggaatgtgccggaatgctctttcacatctgagagagatgtttcagggtccaggctagatgctctttggtatctctccaaggactggagattctgcccctctttttaaaattcattcatgtttttcttaaaatatgaccgaactcctaactcttgctaaccttacacctgggattcttaggccctcagctgaagaacttgatgaatttcaactttaaagaggttcttctaacacttggccatttcaaccaggctttgctataaagtcctgtgaaattgggggactgaaagctaattacttggatcacaagttgcctgtgaaaactgcaaggacctgctgtcagggctcattaaaccccaaagtatggcaccttggcatgcagactactctgaccaagaggagactggaaggcctcagaagccaggtctctgttctttcctcctggttcctgctcccttttctcccgcaaagtgagtcacagaaaccagaattctttttccccaaggcaggtcatagaaactagaactcctctctcccaaagccagtcataaaacctagcaagttcactctcccttcttcctggaagaccctcattcccgaggggtcctgccccatccccaggggaaggggaattgtacagagcgggcttgctgggtttcaccactctgtccatcactgttaggccagatcctttgtgtccaatcacttttctgcatggctgttcattcatcaaacctaaatataaaaataaaggttttccctggggaaaaaaatatgacagacttcagttttaataataactgttgtaataactgtcggtctgtttgacacggtaccatttagccaccatcagccctactgcatgtcaagtttcaatgctcctgttactgtagctggcctgggtgaggtgccagcagagaggtgacagggtgacttcatccggctttttgcgttttcactttagagtggcctttcacagttccatgaaatgataagctctccagtttcaaatgaaggacgcctcaaattgagaactgacaccattgcattcctcaggatgggaaagttccttctccatcaattcttgggcactggagtaggactcttgctgcagatggtattgttctggttctcgagaaggaatccaagataaaggctgtctggggataaaagtggtaccctcttggaatatgggcaggaaggcatccctagtgaccatagccttggttgaaggtattaaggaggaatcttgaggtgcttgtctgggtgtcagttgacaatttcaatgaaattagcagcattaggtctataggtggctgcttaactaattatgaactcagctgcttaaatatatttgctccaggtttcacaattccttttatttacagtaattatcactggttagcacctattgttttgggtgagaatttcagggtctacatttaagtaaaccctatttaaatttattagttgactagggaagggttaaaaaagcagtaaggagtctatgccttctagagtattccctggcttgtttgaaaatgtgttagcagccatttttcaatatgaaagaactgaactttaaaaaaaagtatatttttatttatggcaacatttcaaataggatagtgtaatgaaccctcatataaccatctagcttcaacacttaccaatacggcctctacccactttatcttcccattattgggaagcatgtctcaagcatcatagaatttcatctataaatattttcagtatgtagtcctaaactacaaagaccttcttttctgaacataatgatgatgccaatgtcaaacccttccaaataaatataattacataatgtcattgaatagtattcacattttcctattgaagatacataaaaatataaacaaatgtatgcacatttaaaagaaagcaaacaagatctacacattgtaattggttgatatgtcctttaagtcatttcttctctgtaggtgttagccccgttttggttaaggaaactgcagttgtcctgtgcagcttttcattctgattgcattccttggtcttcacctgtaccattttgaatatttcctgtaaattggtgacttagacgtttgatcatactcagtttgattttttttttaatgagggtactgtgtaagtggtgtgttctcttgttctgctttctctttttggtgtacctttgggtatttgtgaagattcatattttttgctagatttgtatttttggttttaatggttgccttcagactgatacctttctataatacccttgtctgctgtttttgtgggggctattttccattgttgctaccataatatttaaattagccagcgtttgttctttgctctctctttactctcctgagctggggattggaagtaatattcttttacttccagttaatatctaaaaggcaatcagcaagcatattctacttttcggaacttcacctattccccatttttctgatggctatactcatttttcagagcatacagcaattatatactctgctgtctcccttgttaccatcatttagtcttagctctacaggtaaatatctgtttaatgctggcggccagtctttatatcatggctttcctggcattttggttttctgaaacgcaccctctaatagatgccttatgggaagtagttcctgaattatatgtccacaacggcgagtgtgtagtctgtatatttaaaggtcaggttggctagtataaaattgctggcccatcttatctttgcttggatacctttattattttactgtattgcattttgccataaagtggcgtcaaaatctgatgataatcttattttctatccctcaaatttaacttggtatgtttgcctagatacccaaaggaatgtttttccacctttattctttaaagcccactagttagttttatagtattggctgctgtaggttgattattttttttccatagacacaatgtgctcgctgctttaatgtgtaattttaagagttcttttttatttcctctccaataaagatttcatttaccatttgttctgatctttgttggctttaggaactcccattattcatgttagaccttcttagcctgtattctgtatctgccactttctctcaaatccttttaaccgcgtcataattcatttgaattgaaaaattttcctcctttccgtcttctggttcatttaagacactgttcatttttatttgctctcgtgttgtctttacctgtcatttctgaaatgattattttctttatttttaattcttagttcttttgcctccatttttaaatcttcattttcttcaatcaactcatttctgagttttaaaaattctgatttatgctgttcttcatagcttctttcatttagttaatttctcttggctccttctgaaatattaggtcatagctttcctttgtgcccttctggcgtgattttattgtttacacgatggatgtcattctgctccttagtttttctttaaaaataactatgtggaattcaactggattcttttctgttgttaaccgagttttcctatacttttaggagggccagtgtagatttcctagcatcagagatttaggagactctgttagttgttttcattttattttattttatttttgagacagagtcttgctctgcctccctagttcaagtgattctcgtgcctcagcctcccgagtagctgggattataggcatgtgccaccacgcccagctaattttttgtatttttagtagagacagggtttcaccatgttggccagactggtcttgaactcctgagctcaggcaattcagccgccttggcctcccaaagtgccaggattacaggcatgagccaccgtgcccggcctcatagttgttttcataaagtggtaataaaaatatgaactctactttcctatatcctaagactttttttttgtccctacccacactgcttacctgcccagactttcccttacctttgcccctatttcctcatcttagatctcatccccagcagcttctccccagtgtggggctttgccttggcttgctaattcataggagtcagacccctcccactccagaacattctggcacattggacatacaggtggcacagccctctccgcactcactaattaaactggaacttttttctctgtctactctcaggatgaccctctgagctttccagtgagtgcctgatagtggttcctgtagctgatggtagtttgtcatctagagttgttgtggatgttgtccatggtttttgagtctgctctctgtcagtttttatggttggggagagtcaataattatgctgccaccaccatcttcccagaatctatattgacattttaacacaaaatttggcaacctttgggtcaatgaaatctggataaagtcctgtcttgaaatctcaactcagaggtagctgcttttcaaaatgatttgcttccaaaataagttattaaaaatttgtaactatctgaaaactgattactatggaaatgaacactgtatggcctacctaacattagctttctaagcttattgtttatgagaaaatatagtggctgaaatcatccgagtgccaggaaactcactgctgagctattatttctgagaaaaatttataagaactgacatgcttttgtcattatttgtttggtgtgagattccttgagttctgaaggagagagtgctattttacagttttaaaagtattaaatcacatttatacttaatatcatctaataaagataacagcatttcttaattaggtgtattttcctctgattttttcccccactgaaaaatttgcatatctctaattataatcatttctggaaaaaatgctgctagggattgacatgatattaatttagatttccagaaatactaaatttccttcctccaacctgagttttcctccaattggccattgatttaaattacctactaaaaggttacaattttagaattgacctcttacccctctgcttttgggaatggccattatcctaaagccatatgaagaataaggacagatttctcaatagacatactggaaacttttgttatttaaattctggaagatagagtaagattgtttttagacatttcctcttgttttccacaaaaagattgagaagaagtaatttcaaacacagggctggtcgttaagaattctttgcaaagggaaacaggcttaatgtattgctctaagtgaatgtcacccaagaaaaattaagggaaaagtgaatactcattaagcaaattgaccagcaagcgttctgatgaatgttgaaacaaatttgaataaaccaattttgtccattagtgtgcttttaaaccaatgtgattgttttggcctaattattttctgttttgcttattcaaatgtagaatggctgcagaattaactattgcagcaattatctgattagcaatttagaaaattggtgaatggtatctgactactcaccaagaaatatctggtattttacagggctgtgtggaagaacacagactgtccagggaggatatttgctgtttttcactcactacaaatggcagctcagaggatctcactggattagtatgggctgtggatgtgggctccgggctctcagatgtagtgcaccagattgaggtctgatgtgctgcagaagttgtatttgccacccggtgtcactattctggagtcccgtagctgtgactggagaattctgcaacatttcccacttctaaagcttggggattcgagaaatctgtgcccgactggctgccaaagcttgtcagggggacccagtgctaggccgatttctaggtgtaaaagccaggcagatttgctcactcaagaaaatctgtttttgcaggtttgctttgagttccaagatacagatcctggtaaaattgtttgctgcgctaatgccctgagtttcttgtggtagctgggttcccgagtgtggtctggaccagcagcatcaggatcacctgggacttgttagaaatgcaaactctccgcccccacccaagaacctgctgagttggaaactctgagagcagggcccagccatctgttttaacaagctctccaggtgattctgctgcaggcgaaagtttgagaaccactggccttgagtgtaaaaattactgggctttgtcacagctgtcaggctgtgctagttaaaaagttaaagccctcgtggattcttcaattctcttaatgtcagaacgtcagaccagggtgcaattctcagttctccttgtgtcagactaagaaagatagatatgagtttcggttagtccagacaggaaaacagacaactggagtaccatgggacagtgctgcagtagaggcttcgagaaacctgcatgggtggagggagcaggggaagagtggtattttcagaggacaaatacgattgtgtcctaccctgattaaaacctgtcagagactgcccagtgctcttggaataaagtctgtctccgtagatccctttcaagcctccagtatctccttttgatctccattttgcacacagcacttgcctcattgttggctgtggagtgcacgctgcacccccaaaggtgtccagctcctatccacccatctgtggcctctgcaggagctgcccttctgtccactgccaggggcctcatgcttctccctggcctcctagtgcacttcacagcccagctcccacccgtcctttgcaatcttctctgacctcccagggtaggtcagatcagccctcattgtacagcgtgcttgttcgaacttatcacattgtaattacctaattgtataattattggtttattgctgatgtggagttaaatataaactctatgggtgaggggtggggaattcttgccctcttgactgtcccaagggcccagcacacagcaagctttattattggatgaatgaatggtggagcagtcctcatctttgttgttaggacacatgggctggttaatatattacattttgattgaggtgtcacctgagctttagacccctccatccctcccgcccccatccccactctcatccccaccctcgtcccaggagcatttgccaccaccatctcattctactatgggaaaggcaggtccctggcactgtggcagcgaaatttcataacttggttctaacttggggtctgccctgtgggacactagagagaagttcttgagtatcagtatttcagggatatggggaaggaagaactcctttgcttttgcagacattcataatacatgggtcagaagccagcagcctggagtaaaggtggccccggaaggttttcagggaaagtgactcttgcctcctctttcctcggggcttccaagaaacactgcctccttctgtcacagaagttgatggcaggctgggggttgtgggttgtgtttcttcccacccacttccaaatctatttgttagaagatacgcactcctttgccttttagtcaatttactttggcctggttgaagccagtgttttttattcctattctagaaggtaaaggcatggaagttgcccttcagaagcaacagctgtgcaacattgggacatttgtctaaaataagaaactcagccttgctgatttaatagaaagcttgacaatagcttataaaaatacatatattgagaatgagggctcatgttttgtgaaagattggggtttcaagacctagagggtaaagaggctgacgtgcttaatgggaatgttgcttttgatagaggaactggtaatctgttcactattttatttgcacgttgattgatgtgtggtttttgttttttacatttgaggctcaacatattctcttatacctatcgtaaacgtctgctagattaagtgaatgtaataaaacacagtaaatttgggaaaaattataaacacaattcctcactcactgtcagaataccgtagctaccatctgccaggagtgttgatagcaggaagaactataattttgtgctttgataacctatgttgtctgtttccttcatcttcatcagctgccatttttcttcatagcttcaatgcattccatggctggctcgctccttccttccttccttccttccttccttccttccttccttccttccttccttccttccttccctccctccctccctccctccctcccccaatccctgtgaggctgtctccctgctccttcacgttgccttacccccttctcttctcttcttgctgtcaagtgcagtaattatagtagtagtaacaacaggaccattttatttgagtataaagcatttaaaggatttgaagatggagattctgacctattttacccctatagatgtcaaaactgaagtttgtagaggtcaaatgagttttcccaaagtctcacattgcaatccatgcatgtctgactccaaaacccacacctgttttcataatattcctcttgttttcatctgctcacccaagctcagagaagcaccttaatttccagtgtctgatcctccttctaaactttccaatattgctgagtaaagttacaaagctggacccactttttgttttaaagctccttttttggaaataatttcaaacttaaaggaaaattgcaagattagtacagagaactccagtacaccagttgttaacattttgccacatgtattttgttttatatacatatttttttctgaaccatttgagagtaagttgctaacatgaccccctcccccacctttgctgtgcccccttgaagactcactgaaggagacagccttgtattattctatgagaaacactgaggccacccagggtgagttcctctgcctccacccaagtgcagcctttaccttgtccctctagagctgagggccctgctccaaggagtgacactgtgagctgctcacttgtgagccctttaaattaaactcatattctgaaacacatgcactgccttcctggaaattggctctctctagcacttaaaaaacagatcctcctctgtggcagggtaacacaaaggcaagtgaaaaggggctccctgaatgtttctaccaactccagagaggggagaaaggagatttgcctctgcttgttatccggagctgtaggtgaactgttctgctgctggtaattgaagtctatctgcagaacagttatcaagggcagtaaccttttttctagcaatggcctcagataaaacttgtttttcttattaataatttgtttttacttcctttggtataaaccatccctatggctataaagtgacatttttgaaagtggaaatagaaggaaaaatgtcctgtctgttcagtgtgggatggaggggaaggtgcaattttccctatttgacaggcccattaaagcaggatttcagagtatgttcactagcaaaatgtactgatttacccattataatgaaaattagcttaagtatctgagtcaagtataatttatagcatttttaagagctagaaaatcaggcctttataaaatgtagatcataattgaagacaggttttaaaaatgccttagggaaataatattaataaaatgtcaagacgaatggataaacaaaaatatagcatatacacagtggactattattcagccttaaaagggaagtcaacttttacaaatgatacaacatagatgaaccttgcagaccttatattgagttaaacaagcaagagacaaaaggacaaatagtgtgtgattccacttatatgaggtacctagaataatgaaattcatccagacagaaagtagaatcatgttgatcaggggttggagggagcagagaatggtgagtcattatgcaatatttctgtttgggatgatgaaaaagttctggaaatggataatggtgatggccgtacaacaatgtgaatgtacttaatgccactgaactgtatacttgcaaggttaaaatggtaaatcttatgtcatgtatattttaccatagtaaaacatttcttaaatgccccagttgccagatatatgtgtatatatacacatgcacacagataggcatatgtgtatgtataaatgttaatcagcctctcacttatctgtgtttcatttgatatcattcaaattagatgccataagttagaactagagtttagggttgtcacacttttttatgtcttgaagttttcattcgtccttttttttttttttttttttaatgagaaggagttttgctcttgttgcccaggctagaatgcagtggcatgatctctgctcactgcaacctccgcctccccagttcaagcgattctcctgcctcagcctgccgagtagctgggactacaggcgcccgccaccacgcccggctaattttttatattttaggtagagatgaggtttcacggtgttgggcaggctggtctcgaactcttgacctcaggtgatccacatgccccggcctcccaaagtgctgggattacaggtatgagccaccgtgccggccttatttgtcttcctcaaaactccatttcccctcctgagcctgcagggaattgacattttgcagaagcttgagtttcctgataggaggaaatttggtgattagtgaatattggagcgcctagctcacactcgcccacacccacacctgtccaggacagtgctaacatgaaggcagtttgcacttgtcaggtcctcctgcaggatcttgttgcaagaatctggtgatgcccatctgtttgtggagtgtgcagccaggaggatctgctcggaggtgagactgcaccagggctcccttttgtatgtcctaggtcttgggggggtgaagtctttgactagtgtggctgacctttgccatgctcttttgacctgtttctttttactttgttctgaattgttctttaagtgaaggaagaaaatgttcaaagaagggacgagctcgctaccccgaccccaaacttcacagatggtgagggccttgttctggtgtttattggattccaatccttagtgcttttctggttcatgtttcaatatgtgctttccagaaatcaaaacacagaaatctacatatttacggcagcggggatggggtggggggtgcggggaaacgggggactgtgctgggctgttgggaagaacccactggaaatgagaaagttcctcctttctgctcagggatggatcccagtatattttgcttgtcacatccagaccttatccaactccccaaagactgacttcataatggcagagaaaggtttcctcttagtctgtctctgagatcaaaaggggaggtctttcctcaagcattaggttgtatttttgttaggatgagtgagtgagaagagaatatattaagtagtcctatgaaggtctttgctgctggtaaggtgtgtgtatctaggagaagtctgaccacataattagctgagaaaggtccgtctttgagtgtcgaatgatacttgcatcttcatagttaattataagatgtcagagccgtaagtcaaatttcatgtttaggtccttattctaattctgtgtccaaagagtagtataaaaacaaagtaggcctggcatggtggctcacacctgtaatcctagcactttgagaggccaagtcgggtggatcacctgaggccaggagttcgagatcagcctggccaacgtggcgaaaacctgactctactaaaaatacaaaaattagctgggcatggtggcggaggttgcagtgagccgagatcgtgccacttcattccagcctgggaaagcgagactccatctcaaaaacaaacaaaaacaaagtagatgtttagttatatatttatattataagagaatcactgctattcattcttgccacaaacatttgagtgctttctatgtacaagaactgaattttctttttttttttttttttgagactggatctctctttgtctcccaggctggagtgtagtggcacgatcacagctcactgcagcctcaacttcctgggctcaagcgatcctcccaccttagcctcccaaggagctgggagtacaggcacatgccaccatgcctgactaatttttgtattttttgcagagatgatgtttagccacattgcacaagctggtcttgagctcctgggtaagcaatcctcccgccttgacctcccaaatttctgggattaaaggcatgggccaccgtgcctggcccaagcactgaatttttattaatgtaagagatttctttgtcttttttttcttttttttttgaggtggagtcttgctctatttcccaggctagagtgaagtggcacagtcttggctcactgtaacctccacctcccaggttcaagtgatcctcctccctcagcctcctaagctgagattacaggcacatgtcaccatatccggctaatttttttggtatttttagtagagacagggtttcagcatattggccaagactggtcttgaactcctaacctcaagtgatccatctgcctcggcctcccaaagtgctgggattacagatgtgagccactgcgcccggccgatatttctttgtcttgaccgtttttttttttttttttagaagacagagtctcgccccgtcacccgagctggagtgcagtgacgcaatctcggctcactgcaacctctgcctccctggttcaaacgattcttgtgcctcagcctcctgagtagctgggattacaggcatgctacaccacacctggctaaattttgtatttttagtagagacggggtttcaccatattgaccatgctggtctcaaactcctggtctcaagtgatcctcccgcctcagcttcccacagtgctgggattacaggtgtgagctactgtgcccggcctgtcttaaccttccgatggggcctatgtgtttaattccaaacatacaatgtaggatgattaaatcaggataattggggttatcccatcacctcagcatttatttcttctaagcatttaattacagatcttagaattgttagtggctttagactctttactttgtcaaatgagaaaaacaaggcctagagaacctaagtaacttgcctaatgatttagaatccagaactgctatgtctctaccagtatatattttccccttcacatccttcactaattgcttaagagcaaaagtatgcagttatggccgggcgcggtggctcacacctgtaattccagcacttaggaaggcagaggcaggagaatagcgtgagcccaggagttcgagatctgcctgggcaacatagtgagacctcgttctccaccaaaaggtgggggggtggggaagacaaaacccccaaaacccaagtgtaactacctgcaaaagtatgcatttatacatttcatctaatatatacaaatattaaatatttaacagacaccaaacatttaataattttgcttgtcttctccagcctgagaaaagctttgacagatgtcctgtctctaaaacacactcactggaagcttgagtcgttgctgctgggtcctcttagtaagtttccttagaagcacacagaacatttaacatgttctctatcttgggagtgctgttcaaaaagcagaagcagcccaagggcatcttcttttgccaccaggtggcacgcttgtgaattgggaactggtggaaggaatgagtcaaggtgagggttgcactaaaatgaatctcccagctgggcaatgttgaggaatctgagtggggaaatgcttcattgcagagaatgaagtctgtctgatttgcccagagatcacaaaaataaaagacagaaaagcagaacatgaaaatgctacaggaaaggtgggatcggcacaaatgataccttggcactatgtccgtgtggtttaaggcagaaaactgaagggctgacttggccctgaggaggaaactactcagtagcagaggcaggaagggcccaaaccacaggtgaatccacccaggttgaacgcccacacagaggtgtgtgggtggggtggggtggggtggggtggtgcagcctgactgcctccgctgcaaaggatgtgcctttgtgtgcagtgtgacatccctctctagccttggcgaacctgggaaacacttcgtctcacatgtccttggaaatgtgggacccacatgtaccatgggctcctttgtaccactgagagtctcctgaaaagagtaggtccaaaaaaaggggggcttgagcccaaaatgggcttctgcaccttatggacacatgcatcagctcctgggcaggtcaacttaggagcccttctagtcatccctctggctatccctcccctcagttccttctttctttattgccatcttcctctgtggatgttcatctccccaactcttcattctgagccttctggaagcaccctgtgtcttcatgctgccatcaggcactgtcccccacactcactgactccgagggtcctccctccacctcctcccccaaactcctccctgacaccagccagtccccacagttgctgctcccccggcagcacgacaaagctcccttcttccatgtcccacttctgccataccaatggccgggcctgcttctgctgtaccagttgccaggccctgcatctagagatcctggtttgactactgtgggcaaagctctggtggttccgacatgcagctgggattgctaatgagtgtatgagttctatgattgtttctcctcactgctgtcagtggccagtcctgtgccctggagacttgagggtgggttccccatccttctctgctccccaacctactaccttgtcctgaggttctagtgtccatctattttgccattcaaagtaatggcaaaaaccacaattacttttgcaccaaccttctatagaaggccctgtgcactgtctgatctggaatttcctggttctcctttagcagtggagtcattgtcatctctatcctacttcagccaccctgggccttgtcatttctccctggcccctctgttctttgtagtctccactccctccctgggggatttcatggacaccactaccaccctctgtgtgccagtaagactccagagtatatctgtggatataccccacctcctgcctccagtttccagaacctttttgctgctgcctgctgggccaaatgcctcaaaatctgttttacccctccaatctattggcaccccatctccccatcatgtaagacaaaaccagggatatttttctccttgcttcttcactgtccagggccagcccacccaaggtcccaggctcacctggcataaagccacccctccccttcatcccaccacctctggttgatgccctcatcagctcttttctgggtcgctgactggttgtctcctggctgacctttctccaattctgttccccttgcactgtccttcactgctcccagaggagtcctcctaaaacatacatctgcagctcacccccttaccatgacggaggaggcctccgggggttctgccctctgtccctctctagcctcacaccggcagcaattctgaatgattttgtgactcctaggcactgactccactagttctgtgatatttggtcttgaatgtctctcccttctcccctgacccaagtgatagacctttctcctcttctacccctcagcctggctgcacacatcacttgttttgagccctaggaatctttttctgagccttctccacttgcccactgccttagtttcccagctcagttctacataatactctgccctgttttagcctgtacttgcttcattgtatggtaattatgtgagtctgtcttccccactgggctgtgagccccttctttgtattcccaggccaaatgataggagctcaattcccatttcatcaataaggacacgttacacaagtgcttgctttgttactgatccagccttgtttgccattaattactgacactctagctttagctttatttctctgttctgtgattcccctgtgtcaattagttcatcatctttagaccaaccttgaaatatacttaaggagctacttaaaaaaaaaaactaaatatgctgtaatgaagtctgttattttgtgaattttaaatggctaatcatttttaaatggtatagtgctattgcttgaaaccttaaactgtccaaattctgtaaaatcactaaatatcatgtacataatacagtactgagacctggcatgcagatagaacatatctttaatttttaaaagctaaacagaaatttgcattgtccaaaggaactggtttctcaggcctggacatgggaatattacaatgaaaggtaaggaggagatgatgtcaatcagttacctatcattcacctcatgactaaacctgagtaggttttttctttttcttgaaatggggccttactccactcctcaggctggagtgcagtggcacaatctcagctcactgcagcctcgacctcttgggcttaggtgatcctcccacatcagcctcctgagtacctgggactacaggagcgtgccaccacacccagctaatttttgtattttttgtagaaatgtggtctcaccatactgcctaggctggtctgtaactcctggactcaagtgatctgcctgcctcggcctcccaaagtgctaagattacaggtgtcagccaccactcctggccctgagcagattttaatcatgagttctgcctaaataattgctttaatctctgtattactggattaaagatagatctgaacttaagagaaagtgtgatccgtccaggcatattctcaaacttttccatggaactacttttaaagattggaggtaccactggtttgagtgggacatttgggaatatgtggttgtaaagtaattcagtttcttcgaaagctcatttatttcctcctgaaaaaaatacatttgattttaccttctatattacaatatgtaaaacaatatgaaagactgtttaaaattatttaccactgagtgaaatcaaccttcaagaagactcataatcaactttgggaggccgaggcgggtggattacctgaggtcaaaagttcgagaccagactggccaacatagtgaaactgcatcgctactaaaaatgcagaaattagccgggtatggttatgtgcccctgtaatcccagctacttgagaggctgaggtgggagaattgcttgaacccaggaggcagaggctgtagtgagccgagatcgcgccactgccctccagcctgggcgacgacagagcaagaccccatctccaaaaaaaaaataaaaaaaagacttacaatcaaacatcctcaatgaaaaagcattgctctgtagggtgatgccacaaattatttaaccattctttcctttctgcccctttgcatcttctgtactgtagacattccttccccctgcacttagcaggtggtatattcctggcactggacagagaccttactttggattgtgagagctcacagtttggttgggttggggtccccataggactagcttttcctgatgctttggacaccccttcatgctttgagaactttgtcttcgccttccttttccttgaatacacatagaaacacatacacgtgcaaacacatatacaaagtcttcctggctcagctctcccctacaccctttcatggtccttctgggcagcacaggcctgtagcacgtgtgtcacctcttgatgttttatttcattagcattatgtctttgtctgcacaaggctgtgagctcccccatgagcatctagttctggttacacagtacatgcgtgatgaaaggtaagactttaatgacgacggtgcattgagctccccatagtagaacagggacatttttgagattctctgttgcatggcttcctttggttcatgtgggtgattcagagttgatttagtctccccactgctgggcaagagtgttttgaggacttgtgtggttttcactgagctcatactccccctcccccatctgcatgctatttccagtatcatctctttgtttgtaaagcctcatgggtgttgtgggcgattactgggatccttccatcatggttttcatccagtttattcctatggggatataaaagtgtgtcagaaacagtataatatacaaatcattagcttttttattacgaattgtggttaaacactatgtgaaccgaagagtagttgaactacaatgcacaggctctgccccagtcacagttcttcctgctctacttccccaaaactagaataggcctaatgtggtgggttttcttccccgccattattttgtctagttccttatatttgtgtccaaaagaggacaggtttagaaaggacttccttacttttaaccgcagctatcaatccagttgttggagctttagccttttgtgaaggatagaaagaccttgcagtcatggttgacctgggccagccactgctgaagttgccggggagaacccctgagctccatcaacaggtcactcctgcttccacagatcactgcacctagaattgcagtctcaactagtctgtgaattgacatgttaaaaaaatactacaggtatgctttgaatattttatttttacgaattgtggttaaacactatgtgaactgaagagtagttgaactacaacgcacaggctctgccccagtcacagttcttcctgctctgcttccccaaaactagaataggcctaatggacagctaggagatggacagctgcctatcttttgatggagggccaaagcctcttctttgagttttggttgagtgatgggctttctcaggaaagttctgagctgccattctttccatacaccacacccacaatgcagagtctgtgattccttatttctgtgtccttaaatggagtacttgtgaaacaatccaaatgcagaacccacgccaagtttttgtaaattggaggccctcctccgatctgctaatgtttgcccacatttaattcaatagtagactttctttagttgagcgacccatataaagcctttcttagttatggaagaattagcagctttctccccataagcacacactcatttttcaccaatttccataatgtgcactttatacatgtaatttatacataataaaatatcgaatacaactcccataagcaggtttggggataaaaccagatgactcatggtgtgagcagaagagcaaagatacactagagaagaacttaatagtattggacattaaaaatgccttgggcagggtcagtgtggtttaaaataagagcttccaggtctttccactcagagagttaaaagaccttttcctgccaatgcttatttagtataagctcaactgtatagcaaaactaaataaaaatagtgaagcaattaattttttaatgacatgaattaaaacaacattgaggggctcacagaggctaataatagaggccagtgtgatcagataaaaaagtgtcaagatagctgaggcaggttttaggtttagccgggccttaaagaattgttgagtttttaaaacattaattgcagtaaaatacatgtaacttaggatgtactatttttaagtgtcccaattctgtgtggcaccaagtatcttcacaatgttgtgtaaccatcactactaaccatttccagaacttcttcatatcccaaacagaaactctacttattaaataataactgtccatcccccactgtactccctccccacaccttaataacctgttctactttctgtctctgtgaattagcctatcctatgtacgtcatataactggtatcacacaatatgcctttctgtctggcacatttgacctagcatactgtttgcaaggttcattcatgtgtggcatgtatagaatgttactttttttttgtggggggggggggctgtgtaatgttccattgtatgtatataccacattttatccaagttattggaccacattgggttttataagttattggaccacatttgggttgtttacaccttttggctatggtgaataatactgctgggaacattggtgtacaagtatgggtttgagtttctgctttcaattatataggttgaattttatactgctagtgatgagggagacatagcaagtacctgaagaggttataagccagaggcatttcttttattttgagctatcactgaaatcttgcattgttgactcttcgtaagtgtccgcttcctcctctatgctgtttgagagcgaaggccattttctaggttcagcacttaccaagtagctgggataagtatttactgaataaatagttcccggagttcctagcttaaagccgtcattccttatagtgctagttggtctccagagtgttgggttttgccacctatcctttttttgggttaattaattaacatgtgttcagggaacagaaaacaactcttaatattagccttagccaaacataatttgggaagtacatttgctaatgcaaaaagtcctggtgtaaataaaacacaattcaacaaacatttgttaagaacttgctgtctaccacgcacatttcaaaatttggaatttcagagcaatttcaaagctaagttggaatacctttttgaaaggcgttctcttaatacgaacctctactcttttaaaaaaaactttgtttttcaaaaattgtgagactactataacaatattaaagacaatttaaaaaagagaataaacattacagtcccaccctaataaaagccctattttcattttataatgtgagtttataaatcatttattttgaaaataaaaccctgaatacttctggtggcaattattttaattattttttaaaactctagaagtgaagcatgaactcatgatcttgaatttagagggcccttatttggagggatgcatggctgtttgacttgatgaagccaagcttttcttggtggagcagcagaattgacatgggtcatcttttggggatagatctgtagactgttgacatctgttatagggactgggtgtttaggagcctgtcctgtctttattctttcatatgttcaggattgaagaaaatgtttttattactgtgctagagggaaaagtacgatttaggatccttacctgcaggatctaagaccttggagtggatgtaggagatatggacacagttgaacatcagtacaaggcaaatgagtgatgggctgcctctgttggtgggatttagtgaggacaggttatcgcaacatggagtggctagggaacaacatccatgaagaggctgtcttcagcggggctttacacaagacaagatgtgtcccagggacacaggcagaagggatgatgggcatgacaacggatgaagaatgttctcaggatccttagccagtcagcctaaggagaggcaggttgggtccggggaaaacagctagaagttaaccccatggcagttcctttaaagttgtaagagctgctactgttagctgctgctgcctctgttgtggttttgaggctggggatggaattgttaaaaggatattgttttaggctgatggacctcagagttttgagggaggatgagttggggtggggtgggtggcggctggcggggagtcttttaggagaggatattacttctgtgaagtagttggctggtctcaagtggaacagcaggaatggaagggatacagggtgtgtggagggggctctgaaggaaagaatgctaggatgtgctgcccgagagggggaagtcaggtaggaacatgtttggcagatgatggaaactcttcccatacataggaagtgggtgagtccggactgatttggaaggccaataagaagttccatttctggaataagtgtgcctaacatttattatgtgttttccatgtaccaaaacatagttctaagagctttacataacagccttataaaataagtactgttagtatccccactttacagatgagaaactgagggcagagttgagtaggaacttgcctcagggttacacactcagtggcagagccaagatgcaagtctagacagtcctaactcaagagccaggctctcacttggtatgctaaaaggctttcctgcttttctatgatagcatgtattaaaaactatccagtcctgttttaatctccttacatgtgttacctcacttgattctcagaaaaactctatgagatgagggtatttttatcctcattttccaggtgtggaaacttggacacagagttagggtgatatgcctatgtcacacagctagacttagctgcattggcctggtgtgtctcaggaagtcaaggatgtttatttgactggattgtaattatctatatccatcagatcaacccatgagaaaatggaattgattgaaatagattgcagtataaattctttaagaaatattgggtcaaatttgctatcaatatcatgcacattcattgggaactgttcttttttaaaaggaataaataatataaataatagcatctctattgctgcctctgtttttattatttagtgctctgtacaactctgaaaataatcctggccactgcgtgcccatattcttgctgccacatttagatgctgcacctagcggactcaacgtctcactctgtagcctttatgacgttgttgctgcctaataatatttaatgcttataattggacttattgtcttttgatctggggtgtactttgcttgacataatggggctacagttgatgccaccacaggcaatatttggctaataaacaggaattgagactggtcatctatacacacacctgcaggaaacaatttccaccctcctgtaaagcaccttcagtctgtccctacccacaagtgctcttctttctatctcgcatgtgagggggtctcctgttttctttacctttaagcctggtttggctacagatctctatttctgtcttgtactgccagaactacccaagggagaggtctgcatttgcagcttgtagccctggagcaaacaacacttcccactcaattgaaattgtactttagaatttccagcagtctctttgtaaccagattaggggtcttttgttcattccctgccatcttactgtggcatctgcccttagagccaccaccctctctttgaaactttgtactgcattgccttctttgccacttagcctctctcccttttcttcctggtggttctttttcttaaatctctcatgaccctttcctacaccgtcttggctggaagagccctttaagatcaatgcttggttggttcctcaaacccttttctttaatgatctgatcttgttttttaacttcacaaggtgtcactggaccaccatcatctgaattccaggtcataagcaacccactgctgagaagtcccattactggccaggttgtacctgtgagcaaattacacctctcacgtcccctcccctcagaatatgcccccatcccctatcctcacccatcctgaacttgtgtggctcactcagatcagtcctcatctgcaaccttgcatatggtggcaggggacataaatctgatgtgcatgaaccattcccttcaccattctgcaagaggtgactgggggccccagggaatcttgttatcacactgccccagcccacctcacctggggaccttgccttctgcctcctcactgaggtcttccctgagtcaaccttttgctttttcatcccgctgatatggccttcctctgacaatctatagtgtcttttcctgtttattctgaattccttactgtaggttctcattacttctgcctgcgaccagcatgtttcactcatttccttgaatctagttgattctctgggatctcactatgcatgtcacttctctgctgaaaaacctaaattgaatctacagggtccctgaggtacgttcccagaatttacacccagaagttcaggacccttgatggatctggtttcactccacgtagtttcacctgtcatgtgctccgcaaggtaccctgttttttagccaggctggtttctgaataactctagaggctctgtgctcacttcactgccagttcatgctgtcatcttctcctcctcctcctcctttgcccttatgatatggttacactccagcccacctcttgctttttcttcagattgacagtaaacctcatagctatgttttacttcagtactttgttctattgtttttagagagacagagtcttactctgtcactcaggctggagtgcagtgttgcaatcacagtttgctgcagcctcaacctcctgggcttaagtgatctcccacctcagcctcccgcctcagcctcccatgtagctgggaaaacaggttcccactaccatgcccagctaatgttttttctagtttttgtagatgtgttgggcggtgggggcgtctcactgcgttgcccaggctggtctcgaactcctaggctcaagcaatcttcccacctcagcctcccagagtgctgggattacaggcgtgagccacggcacctggccagcagtttgttctttaaaccctgaaatgtatgtgaggaccatgtgtcacactagcatggacttttccccagcatctagcatggtgcttttgtagatgataattaatgaataggtatttgaatacatggaggcatgcatggctgaatgaagtggctgttgtaaaatttctagggttcaggtttcatattcagagcctaaagtttgcatctttataaactaaatagtttcctatctaggaaacctatttaggcattagggtgttaaaacaggtgtatcattttctgccttagtgtttagagatttgtgaatagttctccttttgatgaacattgccatgtaaagagagttatacagaaataactgaattcacacagttttaaggaaaagctattctatgtcatggtcatgtatattctgccaaagagagtgacaggccagtagtttcttttttctttttccccatagtgtgagattttgtttctgttgtttctaagctgggtgtctgcatgtccacactgcgaagatggcccatattcagaatgaaaacttgacccaattgtatgtttagcccagagaaggctggggcattcagcacatcctggcttggggaccaaatgtgaccctcaggattaattgagggttggagaaaataattttatagatgaacttaagacattttagacagaactctcttttcagccataaatagcagggcagctttgtcctatttttattgtagagtacacagaagatggaactcagtattggaagaagtgctttatttcgccaaggaagaagatcatactcaacacgattctgtttttcttggcaggctcttctcaaccatctgtgagtccaggggaaccgtctccaccatccatccatccaggaaaatcagacttaatagtccgcgtgggcgacgagattaggctgttatgcactgatccgggctttgtcaaatggacttttgagatcctggatgaaacgaatgagaataagcagaatgaatggatcacggaaaaggcagaagccaccaacaccggcaaatacacgtgcaccaacaaacacggcttaagcaattccatttatgtgtttgttagaggtaaatgcttggctttctgcagtgctgtgctttcaagaatttaatatcctgctcttaattttggatgacatatggatgactgagccatagataaaatatttctggctgggtctagaaggcctaaaacacatgtttcttcactgttctctcccatcttttgatatgatacatagtggctttgggtatggccccagctggaggactgcaggactgtgatactcttcctaatgagattacagtaggtttagcccatttgtgctggtgctttgagtaaaccctgagaatcaattaggccctttgggaaagctgcattttaatgccttgagatactagatactcccacttagtaaaaacacttcagggagccgaaggcctctcaaagcctaaccagaccgacacttcgaaagatgtggcccactcttaaggagtaaatttcagaaaaataatttggtcagctaaacatcccatgtctgtcatgggttctttgtagagttgtccatagaaaaaaatgtgacctcttataaacaaaagaaaaataaatatggtagttggagttctttgctttatttcctatgacaagttcagtgatttgtctgtgattttaatagccttttcaagagtaagcatgctgggcaggggtgtatcttgtagttgatgtaaaaactgatccactggcagcttaagggacatatccaagtgacgggaggagaaatagagttctattttctagttctgggtgcccctggactggggctgtctttgaaacaggcctgagaggccttatccatggtattgtgaatgaataatggatacttttattctagattggagatcttaggtacctcctgagttcagttcctcactacagtatttggataagatgatctgttctgtcttccttacgtaattgttagggagccaggatggtacaaattctaacatgctccatcaggagcgaataaagctgactctaaagtttgactgtgcctctccgctttatcagttgtcctttccgaagtaggtagctgcaaagagatataccctggtaagtcaccacttcgcctcagggcatgcttctgtgattgctgagctaatccatgtgctgttctttacattcaggaaggtattttgcaatttccaggtggcaatgaagtatcatgacaattgaataaatgaggaaaactgttgaattggttaaatcactctaacagggctcacaaacattcttcatagggaaagtcatcttctgtatcttggaactatccttaattataacaaatgtaagatgtttgaatacttaagtaatctctgttacagcaatgaaggaaggtggggcatcattgtaggagctagactcaagtgacctacaaagagtagataaaacagtaactagctatggcctgggaccatccatagttcaaccatcatgaggtcatttatttgcagaataaattagtaaggttgggagatgcataatttatcttggaaaacttttttttcaaaattgatcaaggataaaacacaaacctatttcaatgatgtcaagttcattttgtgaaacacctgagtttcagatggaaaggacagtttaaaaacagattttaaatgtaatctgtgggcctaaacatgtatctgtattatgacactgtagagagtggcagcatattgtgtatacgaaattaggtttgtctggcttctatgaggccccagtcagcctgagccactccgagtctgttcctggtgtcctgtcataaacactaatggtgttcactttcactcacaagtgtcctggtgggctatggtatttgccacagaattcctgaaactcacaagctccccttgtgcatttgaaattatttgatttccagaagctacatttacatgtttcttcagaggaatatgaatcaagtgagactcacctatcatgggtactgggtggcctggtgagagttttctggattctctttagaagccgaaagactctggaccctggaaagggtcctgcaccaagtggttagaaggaggaagcctttcctgctctcactaggaatcatcacactggcttattggcagatgatccctggagttgtaataaagttttcccaaagttttaagagctcaaatattgctctctgttggacttgggtttgagttccaatcagccatttccaggtcatgtcactttaggagggttgcttttatgacaccgcagtttcatctatgaaatggcaataataatagtactgatcatgggaggggcaatttgaagattaaatgagattaagtgtaatggtccaagcttagtgcgtgatacatggaaagcgtttaataaatgttaattctcaatagtactagatggataaattttgcttttgtttacacagaaaaaagcagccatttgggccactagtcatgaaaggcaacatattagatcttttaaaaagtgttttcagtgtctgtgaccagccattccaactactgattttggatatgcttctatagatcctgccaagcttttccttgttgaccgctccttgtatgggaaagaagacaacgacacgctggtccgctgtcctctcacagacccagaagtgaccaattattccctcaaggggtgccaggggaagcctcttcccaaggacttgaggtttattcctgaccccaaggcgggcatcatgatcaaaagtgtgaaacgcgcctaccatcggctctgtctgcattgttctgtggaccaggagggcaagtcagtgctgtcggaaaaattcatcctgaaagtgaggccaggtactggctctttcttatctgcctctgggagttgagaactcacttatctaaagaagacttctcttctcgttgatccaccttagtgtagtcaatcagggagctagctgttcatagttcccccagcttcaaaaaatgtcatctgcttttgaatttgtttatttcatggtcctgaccccgtgtggcagttccatgactgcctctcatagaggtgaatgtatctgccatagattggcatttagactggactgacttaagtcagcccaaagtttcataattgcatcaagtactcgttctaagggaaacccattgggtagcttgaattatgttggttgaaaagattagcatgcagatgattcattctttgatttactattgacatatgaattgactttcccttcagctgatcaattgcaatgcatcctcaaactgtttgagatctgagaaggaaaattccagttgactgtggaacttgttatggttgtgccgttatgtagaatatttcgttagctggaagataatctaggttttaaatctcagagatcatctaattcaacaccagttggcattcagctattgagtacagtttttattaaggcttttgaaaaagtatacttattgaaattagggaaaatttgattatttaaaacctgggatttccagaggtgagcagggtaggatttgcatgagaaagacgcctgtttgcttaaaagaatataagtagttgttggtcacatcctcctgacaccatcaaggttgtctgaaataaagattaaagcagcttctctatgctagggcttctacttggtttggaaaaagtgttttccagaagtattataatctcacagtgggcatttctgtctttttcactcaatttacttgaaggatgcttgatttaattgctggtaccttcagatatgcaagtagtacagataggttagcaccatgctttgtattttatttaaaagatgacaaagtaagctgtacacatttgaggagaaatggtaaatcaaaatttcatgctataatacaaattatttgaggggccacatttcttttcattctagccttcaaagctgtgcctgttgtgtctgtgtccaaagcaagctatcttcttagggaaggggaagaattcacagtgacgtgcacaataaaagatgtgtctagttctgtgtactcaacgtggaaaagagaaaacagtcaggtgagtgaatcgcttcattcttctcatgttctgtctctgtgggagatgataagttttctctttcagaagagtctgtcctgaaactgcctcgactagtgcgtctgtcagaggtggattgtctgggagagtgttgggattgcatatttccccctttcatacctccacatggagatatatacatttattattagtaacaaataaatttcattttatacatttattttgagaaacttgagagaacttcagattcatgttattacttcatgctgtttctttgaaaaactgttagggacttaaaaaacatggttaactgcatgaatactttgatttaaagctattgttgataccgtttaggccagactatttaaaatattgaaaagagttgccacttccatacttaaaaagaatagagagtctcaattattcaccagaaaacccttccctcgcccacaaattggcctatccatttgaagatgggtttctttttgtaaggatctgatttcctcctttgaggctggttacctgagattaagttgctaatggttttctatttgttttagtcactattaataaaactgttatccttaatctgaaacatctgggcatgcttacgttcccattcatttaacaaatgcatattcaatgccattatacctcagatactgggttaggcatatcttaaataaattttagctagttactgaaattttatccctactaaaagagcagagtttttacactgtcttaatttccaaatactttgctttaaacttcccattgaccaagttttcagtaatttttgtttgaataatcttggccatctagttaattagctatcacagtggtttttattcattacccatgcaagcattatattggaaaaaagaaatattatattttctttctcctcctcttcctcctcctgccccatgttcaacattggcaattttatgcctgtttaaaaaactctttgctaaacaaataaccatggtgattgccataatgcaaagacagtgtgatgatattcatgtagacctgtgatggatgatatcttgctaaatgaagcctgccattgactggtagaatggattgtaccatagacttattctttcaaaccaatgactcagagaaacattttagtttttgtatcatataatgtaatacaaaaatagcttatgtatggatttttggctaaccttacagaatacaatctcatattaattggctttctataatccttgatttcagatgagagaacaatttagaccgggtgtgcatttgagcctctgtataacttgaacattatccttttttgagatgagaaattaaattgccccaggcagttttgttctgaaccatttttcccaggagccctgcatgccagtcccaattaatccactggtgctggtagataagccttcagtgttaggagctctttggggaaatcccagtgtgcacctccaagggttaaggaaaaccaaatcacgtgcaaacaatatgtaatgtgtgacttgcagatggggctcatggctgtctgccaaggttcatccatgaatcttttattgatatcttttggcttaatttagaatactattagcactatcaaattattaaaaaatccataatattttattctgaccctttggaataagtttaactcacaatgtaatttagggtaaaatgactttttagcattgttgccattgtttaagcgcaagggagtcttggagtttgttcaatactgttaatcttagttggttagctttcttaatgcctctaaaccctcacatttttacttgcttgtaatcagaatctttgacagtatcctaacttatgggctttgggtttggatgttcatgctgcatctcttatgactgcactattcctttcagcgctgacaagttcagagttcctgtttgagttctgttgtggactcttgggctcttgaaagaactagaaggaagataccttaaattgagactttgatatgttatctgtccattgtcactctgcctttgtggagaagtctgtgaaactatgaactgggaaaagccagtttgaaaatgttgcttcaccttgctcttacatcttcttgacaattgatcttatgctgtgaaatggtagatttctgccaattattagaagactctcttagaagggggtagtaggaaatctacatagtgttacaaactagaaaagcctttaaagatagttttgttcccacatacccttttagaaactaaaagttaagactagtgatgctcttgacttacctaagatctcacgattagttaacagcaaagcaggtttctgttctttttagtttgaaacattcagcttcagcagtcaacttttgtgtgtggttactttaatgtaaaaatatttgtaaaaccttaataacattaaaaaataggtataattccaccgtcatagatagcaatgctgtgtaatagaaatacatgaaccttatatgtaattttaaattttctagtaggtacattacaaaaaataaaaaaggtaaaattgattttaataatatattttatttgactcagtgtgtctaaaatattatttcataatgtaattaacataaaaattactaattaggtgttttacatttttttaaatataagtcttcaaaatccaggacatattttatatttacaacacaacttactttggactaccagatttcaaatgcttagtagtcccaagtgtctagtccttataaatgctatatagtctgcattttttcatattttttctcttttcccctatgcatatgtattatcagataattgcaattttaaggtacattcaatttgtgctttttaagtaggtaaacacctctcttatagtcataatgctatacttgatatacatttaggtcgtttctgagtttttaccacaaccaacatattgaagcttttattttctgttgagcaatttccttgagttaaatttgctgcagttgatcagagggtatgaacatcctggtaagctcctttccagaaggatttttctgatttataatactgtcagatgctttaactctattaggtttaccaaagcctcgccaaggaatcacccttgatctcattccatgtcactattagctccttttactttaattggttgtttttttccccattgtaataggagtgtgtgtacattacagaaaatttggaagatgcagaaagctatattagactttctttaatcttttcagaaagctgctgtagcttatgttatggtttccccatgactttttaaatacaagaaatctctccatgtcttgtctgcagacaaaaaatgagtgagatggtgatatcacaagggtaaattcacaaccttttcttttcagctcatgcttaaataatttgggccttgttcttagatgtctcttataccttggaactcccttcagtagtttacaagattctgctgggtgagaactgcaggatgagtttccaagctagttgttgacattgtgattctgttttcattcttgcaaataataaattttaataaaatagaacattattgttattagcaatgtgttcgctctcagtcattgggacatagaagagaaaaagacatgacaaaaatatgctgactcatattacaaaatatcagtatcccataatatttcagagatagcaacttttaaaatttagcgttgtatagaatttggaattatacatactagggttaagaaatgaattttcgtttttttcccaatcgttaataatgactgtctttcaacataatcctgtaatatgaagtgttccaatgacagacttgtcatgatgctttattattcttacttaagtagtgtataatgaaagttaatatggagaagttaattgctgctatttttaatttatctaggaaagattctgaatataaattatatggtaatcttcatttttttttctccttttctgaaaccagcagactaaactacaggagaaatataatagctggcatcacggtgacttcaattatgaacgtcaggcaacgttgactatcagttcagcgagagttaatgattctggagtgttcatgtgttatgccaataatacttttggatcagcaaatgtcacaacaaccttggaagtagtaggtaaatacctctatgggaatgtttaaattactggcagtagtgaaagaagaaattattagacagtttcttttttatgtaaatggaatgttgaacagattcttagaattttgttatcactgaatgaatgaaaattatccttgtagcctcttgcaatgaaagcacaaaaccaaattctaccagtttagtggaggaaagtggaaagctgttactaaaattgttcaaacctattattctttgtgcacctcaccctcctttccccaccaaacaaaacataagttgagatttttcaaaaatgctagtgctcgctgaatgacttgagtttggaaatggatgtagaatttatcaaggaacacaaatgcttagagcctgaagtatttctctgaaacttttggtaggggctgtgccccttggtttattgttttgccactcatcagatctagttccttctagtaaggactgaattggacttttcctccctagtattccctacctccttatctcacctgttctctaagcataaagattatagcataaaccttcaggaaggagtgccattgggacacaggtcattggttctacggagcataaactacaacatggtaatctgtccccggaccccatcatatctggtatgcacaattggttcagccttatcttctctactctagaaatttcactaaatatttattttccaagcatctttatttaaagagagcagagcatagtgagtttcttcatgcttttgatttactgagaataataataattttaaaattactttgtttacaatttttttgtcttttgagtattgtttgaatttaatccatttttctgtctttttagtacaaccatattcctagtgttagactttcattaaatacttctaaggtggcaaaattcttgatcaagaacaataataaagtgatgcggtatttgttttcatctctttccccgcctcaccaaatttcttcaataatttatgtagcagtattaaagctttgtgattatcccacaataatctcgtaaaattttggcgtttctgcccatgttataatggaaagtttctccccagactgaacatggaaaagatactttacttgcaattatagtcagcacacagaaagtgtactactttgttcctaaacatgattgtgaaccatttattaatttgaatagaaggctatgcttttaaaatattaaactccataagcactaatttgctaagttgattagggagcatgttgatatatcagcttcagctccagaaagcaattagtaaggatgttttgagaacattgttgtatgtaatcggatttttaaaatccattcatcaatttccaagaattatcactgtatgactggaaggacttgtggctgtgaaacctgaatctggttttgtattgttttgagaatgggttgaggtggaacaggaacaggaggagacaaacagaaaagtaattttttagtggctgggaggagggtttggatccatgatggagtgatgaagagaacagggctttggtatcactctttttttaagaaattacttttttattgtatatttttaagatatacaacatgatgttatggggtacatatagatagtaagaatattactatagtgaagcaaattaatgtattcatcatctcacaaagttaccctttctttgttttttgttttgtgataagagctgttaacattttacctggttttgaattggaggctctgcctgtaatcccagcactttgggaggctgaggcgggcagatctcttaagcccaggagtttgaaaccagcctgagcaacatggtgaaaccccatttctacaaaaaatacaaaaatgagccgggcatggtgccacatgcttgagttgcagctacttgggaggctgaggcaggaggattgcttgagcccaggaagtcgaggctttagtgagctgtgatcgtgccactgtgctccagcctgggcaacagagggataccctgtttcaaacaaaacaaaacaaaagattaagtgtcacaattattaagtaaaaggtatgctaaagtacttaaagcagttcttaacacatagtaagcacataaatggtggccataaaaataatgttagcaattactttattgctctctttttcaagatcttttttatattattatatcaccttttctaaggactccattatttatttaaccggttttctattttgccattttatattataatagcttataatagtgtaaatagcacttttgtttttggcctgtagctatctatctcattttaagaagagttctcaaatggaaattacaagatttaatcaaggaatagataatttaaaaaaaaatctatattgctaaatgcttcctaaaagaattgtgccaatttacagtgtgtaattcagcatactacttttaccacacttgcaaaattattgagtttagttaaaattagttttgctatttttaataagtgaaaagtgatgtcttattttaattactagtttagctaaacattttttctacattttattctcctttttcctgttacattaattattttactatatagacttttaaaaatatttatggatttaaatttgtcttctatgatgtttttcttctgttgcttctaaaaagcctagaaacttcccctctgtagaaatttcataggagtcaattgttatttagttaaaaataacattttattgttaaaatgctctttgatttatctgtgatatataagaagacctaaggttatttttcttcaaatactaaagaacattctttgaacatttttattaaacattagggctcccttgttttcccttaatttatgacaccttatcacatatataattatatattgggtctgtgtatgaactcactatttattccaaattcttttaacctaataaacatcaagactagtagatttagaagacttttaagatggtgatagatctttaagagaattgcttaagaggcagagatgggagaatcagtatttcaaatgtgtgtcctttctcacttgtgacagtgattctacaagagcaaaataaaatgaaaaacagctagttaaaattctcttattgccaattaatactggaaatcaaccaattgtttttgtaattccaagatgaggttctgtttttttgtccagtagttgtagataatggtttctttctgtcttatttcattctaattagataaaggattcattaatatcttccccatgataaacactacagtatttgtaaacgatggagaaaatgtagatttgattgttgaatatgaagcattccccaaacctgaacaccagcagtggatctatatgaacagaaccttcactgataaatgggaagattatcccaagtctgagaatgaaagtaatatcaggtaagaaatggaccttgccctgggggattacacattacccccttttccagtgggcttatcagatcttatttctgtaacccgtaaatccacgagaagatacctggtaaagaagaaagtctggggctgcctcctatgtcctcatcctagtattccattttgttgtgtgtttagagcatgcacactcttgcacacgcatgcacacacacacctgtgtgcctcagttttctcacttgtaaaatggaggacagttttctagagatctgagcttagctcaaagcagtaactttcatgtactcgggatacagcaagtctcttcagagaaaaagggaagttagtacctataattgtttcttaaagctgtaagaaaactaagagccaaataacttcgcttcaggcagtgaacccatgttcttttacactagacctctcatttgatcctcaaaacattatagtaaaaatagtagcaatagtaatacttcaggtaagacataagtgctttttttctgaagcatggttctaagtactttacgtgtattcacccactgacctgaagcctcacagactttgtgagtagacattcttatttcccaccatttttatagaagaggagacagaggtacagaggggtgaagtaatttgaccaagaccgaacggctaataagggctaagtgcctggatagggttttgctctatttttccagtcaggactgttgactgttggaaaaatacgggtgagagatgatagcgtcctgggccaaggactaaaggttggagggaagaggataaatttgggaggtctccaggtgattgagagggcaggagaggcagggaggagttgaagatgcctttaggttgggtggtgagagaccataccattcagggagagcaggaggacggggagggacaagtttctgaggaaagacagtgactttgttttggggtttgttggatttgagattgatagtgggatcttgagtgggattgtttaggtaggaagtatcttttgccaaacgccctagaagcagagcctgagacagggattctgaggcaagtgacttatgcagggatagactgaccagggagtaggggaagaggcatgggagggaaaggaggcaagtaaggatgtggctcagatgaccccaagcctcagtcttatccaggagctgagcggggcttttgcacctctccagctatcagtcacttactggctgcagacctggctgcacggtcaacgtcttccaaggattgcgcaagggcaatccttgggagaatgctgcaggcaagtgtttgggggcatgaaagtagctctgtagaggagacatggtacagagaaccctgcgctggaagtaaagacgtgaaggttgtgagccagcagccagcagctcagtgtgagagagtgggctgcccagggagcttgcatagtgtgagagttggcacaccgcctatggcaagttggtgttgtggcccatgtggatcgtgtgggtcgtggactgcccagggtgacacatgtacatcggagcccctgccagtaaccccgacagggttgtagggtgctcagtgtacacagccctatatggcggtcctgcaagaagtcagaagcttgagtggcaaatactgccaggagcactgagaagtctccggggtggaggaaaaccaggagatgggggtgttgcaagaaggaaggtgagcagtgtggacctcgctgagggcccagagtgtctgtgtgagggcagtgagcatgtgcatgcagggcaggtgagttcaggacactgtggagagcaggctcctgcagcaccatgggcaggggaggaagtggtatgcggacagcccagggtggtggggggagggcggaggcgggaggcggtgggccagtggagaggctgcagcctctgtcaggttgcctttgtgcttaacctttccccactctgtggtctctcacaacaggcgttggtcccagatggaatatgtgtgtgcgtgtttatgtatttgttaatgtggattttgctaatacttactgaattaaatgagttatatttttcctcaaacaggcatagatttccaggtagaaactgaaaaagacatgccttccaaggcatgctatccacaggtgattgactagttgtcttttctttgtagatacgtaagtgaacttcatctaacgagattaaaaggcaccgaaggaggcacttacacattcctagtgtccaattctgacgtcaatgctgccatagcatttaatgtttatgtgaatagtaagtaacatgaagggctccttttaattttttattcttttaaagttgtggctcgtgtttgtaacagctgcaaggactcaacttgtgtactatgtaaataacgtttcatgataatcttgaccttcacagagacttcgtggtttggtggttagagtgtgtcaaaaaaccagttccttgtcctacatttcactgatcacatgaccttgtagaagttgctcaaattctgcgtgctgcctttgaagtaaacagaggagccaaacaagttgaacatacagttgtttgagggaaaatgtattattattgattgttggaatggggggctagtggttgaataggagctgaattactgcgttaggtagggaagagatgctatcgagccctgacgtgatttctttgttcagtgctgtctcttttgaggctgtgatgttacttgtgtttagattgttcttccactgagacaaatgcaatactgacaggcccatggctcactactgagtaccatgtggtatgtgggagaaggtagcagatggtttaggatgggagatggccatgggcacctgagcacccaagtcctgcactgctggggtcctaccgaccccactcctgcagcccaccatgtcttagagaaatgtctgctctgaagttgaggccaagggagcccgatcatgagctggaccttttgccaagtgcagggcttcttcctggctccactctgggccccgtgtgcatttccaaggaaggtgcctcccacaccatacctgctagtgcaagggaggcccctaaagactaggagttccaagggagtggcccaataaatgactattggaattggctttcctgggtgtgtggaggatgaggagacaactggaatatttcatagaaaagagcttaggcgttatgctgggcactttatgtgtgttgggttatagggtgttgtgggaacaaaggactggggccaattccttgtcttgaaggagcttactttctgtacgaggtgttgtggttttgtttttttttgtttttgagacagagtctctcactctctctccctgtctggagtgcagtgacatctcgattcactgcaacctccacctcccaggttcaagtgattctcctgccacagcctcttgagtatctgggactataggcatcccaccacacccagctgatttctgtatttttagtagagatggggtttcaccatgttggccaggatggtcttgaactcctgaccacaagtgatcacctgcttcagcctcccaaagtgctgggattataggcatgagccaccgcgcccagctagatgttttgtttgtttgattttgagacaaacatgtttttgttttcaaacatgttgacaaacatgttgagccagcatctgtctctgtcacccaggctggagtgatcatagctcactatatccttgtactcctaggcccaagagatccttccgcttcagcttaccaagtagctgggagtacaggcatgcaccaccacgcacagctaatttttaaatgttttttagagatgggggtcttgctttgttgcctagactggtcttgaattcctggactaaagcgatccttctgccttgtcctcccaaagcactgggattacaggagtgagccacaacactcaacctgtgtgaagtgattttacataattgtcttatttgatgctacagctcaggaaagatggtagggtgggtggtgtaagccaatgaaaagaaatagctggacagattttttattgctaatccagagtcttttgactatgaacatttcaaaaattgtgttttctgaataagacattcatatgagtttagatgaagaaggtcacattcgtgtaattaaacacatatctttattactggccttcccagaatcctaatatgctaatgtgactttgccagagggggccatgggataggatgtatatatcccaaactcgtttgatcacacagttctcccttttcaagggaaacattaattattatctgagttccagcaaacagttttgattacatagcatttctctggtcctcaattcaagtatctctagattaatttcaatgtgaatcagaaagtaatagtatatagaggctggacgcggtggctcacgcctgtaatcccagcactttgggaggccgaagcaggtggataacctgaggttgggagttcgagaccagcctggccaacatggtgaaaccccttctctactaaaaatagaaaaattcagctggttgcgatgatgagtgcgtgtaatcccagctagttgggaggctgaggcaggagaatcacttgaacctcaacctgggagacagaggttgcagtgagctgagatctcactgttgcactccagcctgggcgactgaacgagagtccgtctcaaaaaaaaaaaaaaaaaagataatagtatatagagcttagtgtattacccatggacaaaattacctgcttctgaaaagtcttaatgttcatctcatttaagagatgaccgtaggtaaatcggtatccttgcaagcataatatgcatattgttcatacagaattttattgtggctgctcttgtgtgatgcttctcaacctttctatgttaaaagactttcttttctaagattcccaatacattgtggatcaatacttcttgtaaaatatagtaaaaaccaattactggaaaagtgaaatgaaaaagaacaatatacaaaatacaagctcgggtttttttattttttagattcaatagatataacaattactctttgtcaaattgctcctcctcagtgcttcttctcagtttctgtatttatctcctgtgcaccagcaacagcagatcgtgggtggggcccactccacagacctcactttgagagttcagtggttgggaattttatgaagtgaggtactttgtgttaccactgtttccctggctttaagtccaaaggggtgtttaaatgtgtctcttttcttcttttttcatgcttccatttgccagtgtgtggtctgccagttggtcatgagatattgacctcaggaagatgtttctgacttttctctggtgggggcaaaattgctactaggctaatttgccattccagcaggctcagttttaatcagtgctgctggtgaacccatgcttatttgaaactagataggatatgttgttagccttccaaaaggatatcttcttggattgcctgtaagtaggaggtcttttctgcattctagggtatgggtctctaatacccacccagcacttcctgaggtcccactgtatttcactggatatacagatgaggatcatgttggtcctgacctcaagctcttcagaaagtcttttccttgaagttagtttgttacaaataacaaactgacagaggcatttatttcacttacctaacacgttggatttattgatttgcaaacgtttggacagaggtagtagcatttatgtttgagctttaaactgtctatgaggtacgtcccagttgctctttagagatatagttagctgatttgttgattttttttaattgaaaaaaaatctagttaacattattatgtggtagtatttttaaaaattttatttcaatagtttttggggaacagatgggttttagttacatagataagttcttttatggtgatttctgagattttggtgcacctgtcacccaagcagtgtacactatacccgtgtatagtctttatccctcacccccctcccacccttcttcctaggtccccaaagttcattctgtcattctcatgattttgcatcctcattgcttagctcgtgaggtaggatttttttcatgttaaattttaaaatcaaaagctaaaataattctacaattttaaacttagaatagttgtggcctttttgacatcattttagctgagccagttacatatgtaggtgtactgtatggtttattttgtaaataagctgagcctcaaggacaaaagggattgtgttctgcaaaaatcagaattgataaaaatcagaataatgaatgcatagtgtttgttagtgcagaaattcagcctacttttactctgtgacactaatgcgtaattgcttaatagattcatctgcaagaaatgctattgaaaatccttgatttggcatggttaaatatttggcggttgaaaaatctatttgttttgaaaattccacatgtaaatttcagtatagtgaatgtggggaaggggcatgttttaattgcttatatggtagacttttaaaaaatattgtgctctgacaatttgtgttaagaaaacacgtatataacatgttaagcttgaaaatgttctaatactgtttctaacctctctaatcaagccatgatttacatgggcctattaaactgactcagtgacatttaaggtggtttataatggccaagagccattataacatggttgccatctttgagtagaacttctagtggaaactgataggaattttcattaaaaaacaaagcaaaaccaaaaattagtgattatatctgcattgaatttgcattactctaattaacttttggaattgcttatccaagatgtgtatggacatcaaattcttagatctgaaatgtttgatatccttcagcgaaaatggtgatttgtttttcttggaaatgaaaatcaggaaaaaagtagagttttgaaaccttacctcaaagtgctttcttaatagacattaacctttccaaaactcttggaaatattagaaaaaaatgacattgccaagatgctatgggtagcttatgctacttatttaggaactgatggcctctttggttatattaaatgtcacacaatgaggtttttttttgccagatccaggacaaataaaaggccaaatatgcactttaatcctaatatatccatttggcttttttccccactccatctagtatttcttgaataaataacaaactttatagtggacttaaaggataatcagtaaagtaaatattttgtaggtttattttggcttcaattttaaatacccatgtgaatcctgaaataatttacataattgtagaaataaattatggttgatatgataaaccagttgtttttcaaacctttggaataattttaagaagatcctgtaaccttaaagtggatagttcaaaacatgatctggtagcatttccagggcggtattatgcatttaaaatatgtggcaaacggtatttacggatcataaatagatcccgctcccattttgaaagcttatcctttaatgacgagcttcagccagtgcggtgggagtactgtgatcctcacgtggtggtgacggggaggcagacattgagaactgaagggctccctttgatcattagccttacataggatgcctttaatgttgagctagattggaagcccaagtgactgctgaagtgcaccaaattaactcagaagtcaccaatttcactccatttatggaagggtattaacagggggttgagaaacaatttaaggaaatgttaaataatgtattatttccaaatcactgcatcatataattaacatcctacctgttgttagcaattatttataggtcatacagtataccaaaatcagccaaagcaataaatcacccagaataaggcttctcgatgagaaagatcccctttgaccaagtatgcaaagtctgggctaccttttagtatttttggttcacagttaaatccagttatggatggtggaaccaattctagggagaagctcctgcagataaagcacatagccatctagcttttggccagccaaccagaaatgatcccaggtagactatcagtgcatttgtgttgctgttaaaaaaaaaaaaaaaaaatgcccggggctgggtgatttataaagaaaagagatttatttggctcacatttctgcaggctgtaagaaacacctgcttctggtgagggcttcaggaagcttccactcatggtggaagcggaaggggaacaggcatcacatggcaagagaggaggaaagagagagaggagaagaagggtgccaggttgtttttaaaaatcggatctcgagggagctaatagtgtgaggagtcactcattacctctagtacagcaccaggctaatcatgaaagatctgtccccatgacccagacacctcccatcaggccccacctccagtattcaggatcagtttttaaacatgagatttgaaggggacaaatattcaaactgtatcatagacccgtgaaagccagccatatagatggcttcacctgtttgccagctctctgggtcacccacctggctggaatctccaactacctttatccagagtaaaataataacggcagtcttgcctgcaaggactgctcagatttggtccttaaggccactgtgcccttcaggaagatcctcacaaaacagagcaaagttactagaacttcaacttttttggaagatggcaatgtcttcccaccacttaacctattagctttttctttccattttttaaaaaaatagtaggacctttcaaacacatgcgcgtccaaaccatacttgtgttagaggccacaaatttgaagacttgctgttaatttttgcttgaaagtctttgcttttcagtgttttccccattaggtggatactattagcgtgacttcctcttatagtaaataattgtaaattttaaacgttaaataaagtgccgaatagaactcctttctgatttatttacttgcttttgagagtttgctctaaggctgcaacagtaactggaacatagcttcgtttgtgtgaacatttgtatgctgcatgtttttaaattaaaacaattttttctcattacaaaagcattatgtgaagggtagaacaattagaaaatgtaaataagcaaaaataaaaatcaagttttatttttactttttatgtttatttactttttataggttaccattactaatattctttattatacattcctccagaccattaatttttttttaaataaaaatgaagtcatattgctttataacctggatttttggtgctgcacaacaaaagcattgtgaatatctttctataacatcattttggcatctcagtgtatggatcttttataatttctctagcccatgcctgatgcaattttgagacatccaggagcgaggcgggactctgaaatgatgtgactgaattttaaaagaaacctgtcagatgattatttaaagtttataattatcgtgtttaatgtctaatgagtgaccttgcttaagtggctggaagttaataaggttatcatctgttgttatctttcatgctctgtgtcttcaacatacgatatggcagatatactgtgctggctttcaggacagttctaaattaaggaataattttcagatcttcttagtgtggtagctaatctatgtaaaaatcgttgcttgtcttttcacattaatctttttatagataatatgtgttcatttgagatatctgacagtgtttgaactctgtttgtattttctgttcctgaacttgaaatgagtttttgttctcaaattgcttgggaattatgaatgttgtttttgatgtgacactctaatatctctttctccttataaagagaatgtctgtggaggcaagaattgttatagatgtttaaattggaaaaaaaaagatataatggcaacctacttttaaagtagaacttgattctcttctgttctgaaaaaatttagcagatgtagctctgaactaagctaaacatctttccctcctcaaaggctggcatcattactcttcctccctatctcataagaaagttggtctggtggatgtgttgctaatttaggggccttgatgtaaacactgaacctgtaagagaaccaggtaaactctctggatccatagcccttggttgcccccgtttgtgtggtttggccatttttttatgttgatggtggaaaagcaggagaaacaggtttaggtatgtagccatgtaaacttctgctggaattgactctaaacttgggtacatagacttcgctaaaagcagtgagtggtcccttttatattgtggaacttccactctgtggagattttcttttcagttgagccacttgtttttacatcaaattagcttccttcatttacagatatatgcaaggtcacctgtaatgtagtgaaatttaaattaatccaagaatagggacataatgtttccatgggcattctgtcaatacccttctcctccacttctgaattatgttgcaaaatgaattagctacttttccagagtaggaaaaaagaggcttttgtcccatgcctgcactccttggcagcaagcagagtggcattgtgatgtgtgtacaggtcttcctccccacggctgggtgatacagcaatggtgctcctgtaagttgagcagtgattctggctgaagaagtctctctccaagtagtttcatcatttttcaacgtaatctcgtgattgggatatctttttgattgctgtttagaacaggggttggtagaactatagcctgctggccagaattggcctgtagcctgtttttgttttgttttgttttttgcttttgagacagagtcttgttccgtcgcctaagctgtagtgcagtggcacaatcttggctcactgcaacctccacttcccaggttcaagcagttctcctgcctcagcctcccgagtagctggtattacaggcacctgccaccatgcctggcttatttttgtatttttagtagagatgggatttcaccatgttggccaggctggtctttctcctgccttggcctcccaaagtgctgggattacaagcgtgagccactgcacccggcctataacctgtttttgaatggctcacaaactaagaacgttattgaatttatttctgattagttttaaaaaatcaggagatttcatgagacatgagaatacaactcaaatgttagtgtccacaaggaaagttttattgaaaacagccatgcctatttgattatataatgtctatgggcacatttgtactacagctgcagagttgagttgcaggaaagaccttatggcccacaaatctaaaatatttacctgaaatatgtatctcgccctttatagtaaaagtttgctgagccctagttgagaaaatcacttcattaagagaatgattttttttctttttaaaatgacagtcactgttaaaataaataggtacaggagattatagttgaagttttattttgtttgttaaataaacttctgttagtgtccatatgccaatttctggatatctttaagaatgtataagacacagtatatgtccaaaatatctatcctgggaattttttaaaaagtataatattccttttataagtaaggttatttttctactccaattttagctgacttaaatttctttattataatggtattatggcacaagtgtaggttttacacagaccaaaaccgggatagtgaaaaattccggaaaagcattgcttcattgcctttaaacaccagcaaacctcgaattttaaaaacagaaattcattcttatgatccctcttcatttagtcttttattatttggagacttaagtgtttgcgttttttgtcctgctgattataaaatatgggcaaatgtgcatttatagcggaagttggttaaagtggctgggtgagagaactctaatcaaaaaatgcctccctgcatttagatgaagaaaggaagaccccttctaccattggcttgtgtattgcctttcagccaccagccctcagctttgttatctgtactatgttcttaaaattcattttgttcttgctttccacatggactggatggtgatgaaaaggaatattttccaagatcacaaatctgtggggtaaatcactggatgtgtaggatttttaattgcatgagcaataaattctcagcagagttacaagcatctgaaatctgcctacaagctgatcggtgttgttggcgatatcagaatgactcaggtccatgatgtttttaaaggcaaaaaggctatttttttttatctccacaggaaatgcataacttatacacctcttaggcttatctaaacctccaacttgggaggaattagagaatgtgtcatttgctatactgcttattgcagaatatctaagaagccacagctcagatttaacctggagaactgcagagttatgtatctttaaaggcaagatgtatatttaatgccaaacacggtgcattgaggcacttataaaatgcagatgagcccagattttcatttttaggaattagatttccacctggctcattctttatgcattaaacattttcataatgcaacttgccaggtacagctcatgctgtactagtgtgtctcatccttttcagaaggaggtctcttagcaccagtgttagggaaagggctggaccgaggtgaggcaagaaaggcacctagagtgtgaaatataaggaggtgctctcacagatacccactcataggccctttagggttagtgccttcttatttttatgccctgggtgcttctcttgccttactcttgtcctggctttgataagggttccttaaaggccctttaaaaaggtacattgctgggttataccctcagcttactagatctctggaggtgcggcccaggaatgtgcatttattctcttcccttagagagtctaaggcatattgaagatttaggaccctgtcagcttggttggccaacctaaggccagcaggacaaaagctgctcaattagcctcaggttatgacccacctgggatagaaacttaacaaaactgcttaattaaccggcacatgggaacaagtaggccagccagaccacaccgttgccagccatggctgttgtataactgctaccaggtgtcacgctagaaggcttggatgttagagcatacttgtaaccaaagctaaatggaattgattatgtaattttgagctgttccaattttttaattaaacaatgttttataggttcactttcagctacccattcattgcaaaataaaattagaaataaaagaataaaatagaaacttttcatcaccttactacccagagataaccattgttaacatcatcttaaagtgttctttcagcctttcctccgcctattaagttaatatttaatttcactaagaatttaccatgtagtgttatgagcattaggaagtatgagtattaagggaatataggtatgagtacatctatgttgtgaacttagctcctatttgagtcctattcagttatctctaccatctttgtgtagactggtcccactcatcattcatctcagtgttataaaaaattcatgttgtcaggcgcttggatttcttatctcatggccctccattgcaaaaataatagaaatagtgccgtatttacgaaagtcaccattaggctgttcccacaggtctcttcttgtgactctataattgaatgcctttggaatcttagagacttgttcctttgggtgggatcttcatcatacaacagtgcttactgtgtgcctgctgtgggtctcactgagctaggagtcacaagtatactcaatcagtaagatgtcgtttctgccctcgagaacatcgagtctgatggaggaggcagaccaagatcttgcataccagcgtcaggtgttcttaaatgctttgggaataaggaaaggagagagaccagcttggcatcagagagtttaggcttgcttagaaaaggaggtgacacttaaactgagtccagagagacccacagtatggcacctagagtccctagcaaatagcactctcctaagggtctgctgatttcttgtgtcgtgtcctacttttcagcctgatcacacagttgcccatgataattaaatgaaacttgccagatggatgctttcgcaagacgatggcttgtcttcttgctctatttgtaaagctggcattggatccaaactctcaaggatgcccctaccttgagattgttttggagagtttctcttttgtgtatattagccaaatggcctgctcatcagcagggccaggttgagtgacaggtgggtgtgtcatgcatgtggatactctgatctccgccaactccagggaggtgcctccagggaggtgaggtgctgagaggttattctacaaagatgtcatttatcagtgttaccttcctttggggaaataaacttcctaagtttctgatctgtcagtctttccttctcactgcatatattttccctatcagttgcaatataattgatgttgaattccctgcgcattgggttaaaatatacaccttatcagactattctaaagaaggaatttttagattattgaggagaatatttagagtggcaaatacagttcacttcatttgtagtgaaattggttatccaagaaaggtagatattctgattataaaataataactcagtattaatagtaataataaattttattgagatggagtcccactctgtcacccaggctggagtgcagtggtgctcactgcaacctctgcctcctgggttcaagccatcctcctgcctcagcctaccgagtagctgggactacaggcgcatgtcactgtgcccagctaatttttgtgtttttagtagagatgcggtttcactgtgttgcccaggctagtctcaaactcctgacctcaggtgatccactgcctcagcctcagcctcccaaagtgctgggattataggcttgagccaccgtgcccagcaataataataataaataattgtttcatttctataagtcattcttagctctctgtatgtgccatctcatttaattgtctcaatatccctatgagaggggcacagttattattcccattttacacatgagggaacaaaaatttagagagatgtagaaacttactcaagttcaaagaactgagaaatgtaagagctggtattcagatgtgtccactatgcatggggctcccgtaattctgtgcttagacttggcacaatcaatgctattcttcagagtacagggtgagcatatcagcatccctgccatcctgttgcttctgttgagcttatttattcttagagggttggaatccttcagatgtattgccatcagaaccaccgagtataagtgcatcttcctttcactttgtaaataacttcaaaaattagaaattcttgagtgttagctggttattgtagttacatagaaataccaaattagagcatttctgctgttacagtgaatatattcagatttatatatatatttatatatatatatgtatttatatatatttatatatatttttatatatatgtatatatatttatatatatgtatttatatatatatattcacgttcataatatacataaatatataaatcttaggctggttttcttttctagttttctgttcatattttgcatttgaaacaaagatttgaagtaaagcccatattgtattttactctttatgttctagcttccctgtaaatagagtgattcggcttttaatcggcaccacccttccacccccaaaaaggagaaaattcatgtaagagcaaaagagtggggcttatcttttcctctaacaactcctaatttcatccattccagttcccacaataacttgaaattcctagggcaggtacagttgcttgaaatcccattggcaggaatcctttaaagtagatttttacctgtggaacactttggagtcctagagtttgattagaagcagtcttcagatccctactccctgaaagcagaaaccctgcagttggccctgccacctctgcctcagccatctcctctggggctgggccactgtggctgggaaagcctttctgggttggaccctgacagccgcctccttgtaccttccactccttggttcagattctgccctttgaacttgctccctcaggctactcagcagcctcaggaaggttgtagggattagagagggagtgaagtgaatgttgctgaggttttccagcactctgacatatggccatttctgttttcctgtagcaaaaccagaaatcctgacttacgacaggctcgtgaatggcatgctccaatgtgtggcagcaggattcccagagcccacaatagattggtatttttgtccaggaactgagcagaggtgagatgattatttttggcactgcttataatgcagaggggaaggactgcaattcacttgaatttcaaatatgttttctgattttttttaaaaaagctttgttttgattattgttttttttctagccatgtggctttttagaagggataattgctatatttttcttggtagacattaattttgtttgctgaaaaatcattactgaatgacttctctattttggtgttatctttctggatttatcatgcaatttctagcctgcaggtagataaagcaattttgcaggacagagtaattagatttccattctatacacaggaggtaatgtgtgtgggaaatgtgactgtagttatcatgaaaaaattacctcagtagttaattgccaagttaccaaaaagtaatgatcgcacaattacaacatacatatggcatttgcaagcgaccgcttttaaaaagggtttcttcttgataatgtgcccagcccctgaacagagaacatctggcactgtgctgcttgcccctcaccatccacacttaagccttaaattgcccttttgcattacctgaagacgaaaatggggtcaccacagctgtttttatccatcaattgctattttatgctcaggctttaaaagcccaggttaacatcacaattgaatagttagtatggtcgcagaaattttatttttcatggaataagcctctttatcacaacaagttggaaggggttacatcggattgctgttttcagctggggtttaggagagtgttttcttttggggaatactaagtagggttcaaggcccctgggaggaatggccacagcagaagcaagccctgtagttacaggcattcattcagtagatacacagggagtggcaagtgtgtaccagacactattctaatggacagaacacacccaagtctttttgcctttatgagtttatgttctagtgcaggggtgttcagtcttttagcttccctgggctacactggaagaagacgactgtcttaggccacacataaaatatagtaacactaacgatagctgatgagctaaaaaaaaaaaaaattgcaaaaaaatctcataatgttttaagcttcatgaatttgtgttgggtcgcattcaaagccgtcctgggccacatgtgggctgcaggttggataagcttgttctagtgggtagaaacacataatagatggaataaacaatgaatgtatgtaggtgttaagaaaggaaacagggaatagctaggtgtttagaatagggaagtcggggtctggctcatgaaaaggatcccttgcagtggtggtctcagccacctgcagtataactaggccttcctgcttagaactcaaacttcagtcctcactttgactattttctggtctacatccttgattttgttgttgttgttgttgttgagaccgagtctcactctcttgcccaggctggagtgcaatggagtgatcttggctcactgcaacctctgcctccagggttcaagtgattctcctgcctcagcctcccgagtagctgggattacaggcgcctgccaccacgcccagctaatttttgtatttttagtagagacgaggtttcaccatgttggccagtctggtcttgaactcctgacctcaggtgatctgcccacctcggcctcctaaagtgctgagattacaggtgtgagctactgcgcccggccccttgaagattttttatgctttcctcctctatgctatttcttttcaaccattcgtgtacccttttgaagcttgtttattttagggatctactgtgtaccagcatatatgcctgccattttattgaattcctttccaatcctttcagtaaccctctgcaatgggtattactatccctgttttacagtcgtagaaactcagtgttggtgggggttaaaaactcatcaggattcaaacccgcatctgactccgaagcctcctctgccttctcttccccagtgcttttttcactcactaggtcaccaaagtgcttattcttagacacttgtaaaaggacattttctgttgattatgaacctctaactttgttttaaaagtatgccacatcccaagtgttttatgtatttatttattttcctagagtaagccagggcttttgttttcttccctttagatgctctgcttctgtactgccagtggatgtgcagacactaaactcatctgggccaccgtttggaaagctagtggttcagagttctatagattctagtgcattcaagcacaatggcacggttgaatgtaaggcttacaacgatgtgggcaagacttctgcctattttaactttgcatttaaaggtaacaacaaaggtatatttctttttaatccaatttaaggggatgtttaggctctgtctaccatatcagtcatgattttaagttcattccaacattgaccatgtcatttctggtaatacatgcatcacaccatactgtcatcaaactcactaagtttcattttgtactagcttgttaagtatatgcttttaccagagcaattttaaccatgctactttatatattttatatgtatgtgtgtctctattagttgtatatttacaattgtctccattaaaaagagctagagaaagcaaatgggggaatatatttaccttacacccaaacagaattagaacaatctaaaatttaaattcaattaaaaatttcagttatttaaaatgaattattttaacactttgccagacactgtatccaaaagttaacactgcctttatgaagtcatgttagcaagttatttctttaaaatatttaaaatttgattcatgtgtgactaactctcttaacaagttaaaagatcttttgggcaaactgatgaattggtacaaagtgggaagacaaagaaactgggcacttactttttaggccttcttggggttttgtttgtttgtttgttgttttcgttttttgagtcggcaaagactagtgccaaaaagtggcgtgttttctcaggttttgagtagtgaggggaagaatcttccatgtttttcagacagggcaacgaaaagaataccttaaaaatgttttttttttttttggttgtgaaagacattcatgctcagtgtagaaaatttggaaaatacaggaaagcttaaagaagaaaatataaaccgtccataaaggaagcttcttttttttaaagttgtacaaggcaggaatttgattgaagtataaagtgcattcagatgttgcttttcattgaaaaacagcataaattattccttttctacagaaatctcaacttctattctgcagtattgtggtttcaagttatatttttaaagattcatttgaataacaagagtacaatgtaaccaaggtgaagctctgagactcacatagctttgcatcctgccatgggctgtgagttgggaggtggggtcagtttgggactgagtggctgtggtagagatcccatcctgccaaagtttgtgattccacatttctcttccattgtagagcaaatccatccccacaccctgttcactcctttgctgattggtttcgtaatcgtagctggcatgatgtgcattattgtgatgattctgacctacaaatatttacaggtaaccatttatttgttctctctccagagtgctctaatgactgagacaataattattaaaaggtgatctatttttccctttctccccacagaaacccatgtatgaagtacagtggaaggttgttgaggagataaatggaaacaattatgtttacatagacccaacacaacttccttatgatcacaaatgggagtttcccagaaacaggctgagttttggtcagtatgaaacaggggctttccatgtcacctttttgggtacacataacagtgactttaaggaactccagtggcttcctttgttttgttccacctgaaacaatgagttttctgtgaaattgcgccccttttgataggtttgccatagagaacatcgtaggaaaatgtctctggacaacattgtttttaattcctttattgattttgaaactgcacaaatggtccttcaattccaccaccagcaccatcaccacttaccttgttgtcttccttcctacagggaaaaccctgggtgctggagctttcgggaaggttgttgaggcaactgcttatggcttaattaagtcagatgcggccatgactgtcgctgtaaagatgctcaagcgtaagttcctgtatggtactgcatgcgcttgacatcagtttgccagttgtgctttttgctaaaatgcatgtttccaattttagcgagtgcccatttgacagaacgggaagccctcatgtctgaactcaaagtcctgagttaccttggtaatcacatgaatattgtgaatctacttggagcctgcaccattggaggtaaagccgtgtccaagctgccttttattgtctgtcaggttatcaaaacatgacattttaatatgattttggcaatgctagattataaactgcttggaagatttttttacccagactgttgttctctcttgctagattttgttttcctcattgttcttaagaatgcagattttaattttatcattatggggtagaacagcccaggacataccctagttattgtcgtatttgtaacatcaacgacatcagcctcttgaatatctcatcccgaccagaaggcttctgttatcttgtaagctttatacatttcttgatcatatgtagccactgaaagggttaatattaatttgcatactacaatttaaaacaggcgcctaagcctactggttctcaaatatacaccaaatgaggcaaacatttcacttctctaaaaataagtttccaatttgaagccttagttgaagttcccatcaaggatgtctgtgatgtttgcagaaagtatttcagttgaaagaaacaaagatgtgtaaaatgagctgtttctggagatccacgataaagttgacagccttatatcatgtcttccaataatccccataaatgttgcttcaccacatcatgaattgttcatgagaaaatttcttacccaagttaattagttgcctgttacttctaaactacagtttaaacattcatagcaccaaaaaatttttcaactagtagcgctcagaacacaggtcattttaggttttcactcactttccagtcttgtcccagctggctgctccttgtggctgattttcccactatgccacagtttgtgccttcattatttccataataacgttacagagagtgtgtgaagccctgctgtaaacagaagtgaaccagaggattcacgtaggaagcttgataatagtagaatctttgaaagcagtaacttctctctgtaaaaccagcagtcatgcttggctccaaatactaatgtcacttagaaattcaggttaaaagaggcttgcttgttttatgttactccacataaggctgcttttttgataagcagtgttaatatatgggattgtattgggactaagtagtctgatccactgaagctgaatattaatggccatgaccacccttgggtatttttatgggaggcagaattaatctatatatctcaccttctttctaaccttttcttatgtgcttttagggcccaccctggtcattacagaatattgttgctatggtgatcttttgaattttttgagaagaaaacgtgattcatttatttgttcaaagcaggaagatcatgcagaagctgcactttataagaatcttctgcattcaaaggagtcttcctggtaagactgatttacataaatagttagctgttgacaggcagttcatggggtcataagggtttgcaatcaaggctgattctttaaaaaatgaactgaggtactctgaggtatgaaatcaaaattattaaatcatttaaatgtgattaacagtttagaaagttaaattgtgtttttaaagattcaaacctagatttttgctgattttttaaaaatgtattttcagttttcttctacactttagttccatgcaactgaatgcattctatatctgtttctcttacggttctgtcctgcatgtatttccatttatactattgagcttggtactacatgcatgtttccagtgagatactgtttatagggaaaatgctaaagcctctcaagttgccacagtaaagtccctttaaaacctttagcagaatgacaaagagctctgaacatatctccacatgtaggcttcttgccatcgacctctggattattcctgtataccttgcctcttgccctttttatttcatcatgctattaaaagacataactactccagcacattttttaaaaattctggacattattctcatctctttcatcattgatgccattctgaatttgaatcatgtataaagagctttgagtttgacttacaaccagaaaagaattcttctcatatcttgcctattctttctttggaaatgctcttaagggccaccatttgagaagacttcctagatgtacccagtccaacagaagtcatggttattttgcccagtcccctatactgtatattgctgcagttgtgtggtagatttctcctatccttttcatgcactttatatccactgcatcttgcaatggcaagacattgcctcctgaactcttaacaccaggtcctcaaggagacctcagtaaatattattgatgggcaattaccccttaaagccattttctgtacctctggctaaagtttaaaaccccaggtgaaactttttatttttttttaatcctataaacttgagtagtttaaagtggtagtagaaactgtacaaaaccactttttgttagtttctcctgggcatgtgctcattatatgaagaaatgagccattttgcttctttccgaaaccttggccctatatatatcctttaactttctgatataatggcctaaattgttcaatcctgtgtgatgttctttgtgctttgggatcccatatgggattggaaccaccagcacactctgaaggagattgttgtcatggtgtttctatgctaatcagaagcaggaagtactagaaatcttgaagagtctccagccaaatgttgcagattgaagaggtccagatggttcagaaaatcatccaaattattggtgtttatctgaaccaacttgatttttttttaaaccttcctccatcagtcactatatgttaacgatctctgcctcctgcataacacgtcttggaagctcttctttgtctttctttcatcttgtctcctggggctcatttagagagtttgaggtaatacgggataccatatttggctctctgtctcccattaaattcattgtgtcaagagacgggaaatttctaacctgagtcctctatatgattatacacaaaaaggacacctagtttctgggcatggaccccaatatcgattattaaaaactcatttcttacagaacaggattttcaaactctttattcaaactttacatgactttcctcaaattggtccagtctattatgtagcaaaggggatgaggaggtagagcatgacccatgagtgcccttctacatgtcccacttgattcagtcatgacttgtttcatctctcccagcagcgatagtactaatgagtacatggacatgaaacctggagtttcttatgttgtcccaaccaaggccgacaaaaggagatctgtgagaataggtgagtacctacctatcaagcaaccaagagtaactttacagagagtatgtatatcatgctaatgtggaatataacatcattcccagtagcaatgatgcagaccagttctgctttatggtagcagtgccaatggtcaatggcagttagggttgcaagtgggtgtttggggtcagagcatatgtttttgtgcctgagtatctttctatagatatgggatctttgctttaattcgccatccctctcctctatggattttgtaacccagcctaggattgttaaatattaactttgtgattcagcatctacctttcctggacaccagggaagtgatctgcctgcaagttcacattagttcattcattaccagcctttggtatgtcattgccactgtcttttcctttcctgacctttatggttgtaattgctaagaaaaatcctctcttcctcacaggctcatacatagaaagagatgtgactcccgccatcatggaggatgacgagttggccctagacttagaagacttgctgagcttttcttaccaggtggcaaagggcatggctttcctcgcctccaagaatgtaagtgggagtgattctctaaagagttttgtgttttgtttttttgatttttttttttttttttttttttttgagaacagagcattttagagccatagttaaaatgcagaatgtcattttgaagtgtggtaaccaaaagcagaggaaatttagtttcttcatgttccaactgctgtctctttggaattcctgttctaatttataagctgtaaagtacaagcctgtctaaatgagtttttctatgaatattcttttatatgcagtgaaattcttttaaaacttttggcttttaggatataggatatgttcctagagaacagaatcattttatcagtaaaagcagagggcacctcatagttacaaggcttggggtgaagcatagacttgagttttattgaagttagatccaaatattatatgtgtggcttatgaagtgtcaggaaataaggggtcagagggagtaataaacacttgggagaaggttaggaatggaaagaatgatggaaccaaaacaaggagcatggtctgtggaagggtgaaaggagttccttaggaagtaagattaaccgaacagaatgagttaccagtcctacccttaaatgtcatgggtgacatttcccaacaattaccaaactaagaaaggatataagatggctgaaataaagaccttcttccgtgtgtccttgggagatgtcagattgaatttgcaaaggcatattaggaactctgtgaaaggacattcaaagagatgcatgcaaaatgaattttcagtttaaacaatatgatatgactatttcttatgtatttccctatgaatgaaagcagtcctgagaagaaaacagcatttattagaattgcttttaaaagagattataataattagactcttgattatgtgaacatcattcaaggcgtacttttgatttttatttttggtgtactgaatactttaaaacaaaagtattggattttttataatataagcaacactatagtattaaaaagttagttttcactctttacaagttaaaatgaatttaaatggttttcttttctcctccaacctaatagtgtattcacagagacttggcagccagaaatatcctccttactcatggtcggatcacaaagatttgtgattttggtctagccagagacatcaagaatgattctaattatgtggttaaaggaaacgtgagtacccattctctgcttgacagtcctgcaaaggatttttagtttcaactttcgataaaaattgtttcctgtgattttcataatgtaaatcctgtctagggatatcacacattttagcagtcaaattaagtatacttcagcaaaatttgcatggtatgctgaacattactacaactaacattcaataatagaagtcctaattctaattgtgtaattttggggcatgtgaaggaaacagaaatagccttaattttcattatagcctgagaatagcaatgaacttgattttgctcaagtgtaacaaatgtaggtcattgaaggtcacagcaggagaaattttggggggattggcatgccgtgtgaaaaatattaaaatctaagatcatattcagagttagccatatagaatgttggatcctagaatacacggagagctattaaataggttcataagtaataatgggtttgtagaacatagcaaatgtttttcaaagtgctgtatttccttgccaatttttattgaatcctcagaacaaacccttgtcctataattgcagcaccttcctattttaaaagttggagaaactaaggcatggcatattttagtgctttttatctgaggtgacacaggacaatagaggctgaaactagagcctgtgatttccagagtggcatcccatcgccatggaaaaccatattgccctttataatattctctgcctgtcttcctgggcccatttctgcagtccagatttattcctggaggtggatttttgtgccccttatgataatgtaatgttttccccccatcactgtggcgtctctattggtagcctgtactcgatttggttttgtaagagtgtttctgtgtttatctcctggccaaagcatgaatttctgaaaaggctgccctgaagctagatattatcatcaggagtgataataaaaacaacttctcttcatcctggtgcaattttggaaggaagaatgataagtcgttaattatccagtcctctgaatattgaccaaagggaggaggaagaaggtggccgcctccaggcccagtcttgatgaattctgcaatctgtctccattatttcatgcctgtgtaattttgtcaagagttgtccaatacctctgaatctttgtttttctccccttgggaataatagtgattcctgactcagaaagttatgagttaatatatgtaaagtgcttatgacagtgccagacatattgttactattctttatagatgtcttatttacgatctaaataatcgtgacggtggttacatactgtcttgttattggttagtgaccttagtttgaaatgacaaagaggggttggctctatcaggcttccagattgtagactccagttcaagtcagttgaactaaccaatcacagatctcgctttcaccaggctagtgggtaaggagaatttctggaacaagataagaagaaggaaactcatatatgttaccgccccacatttttgtcatcatcatttgagatctccttgttgtgtcaggttctctgaagttctttcctttcacatgagttcttcattgtttttcatgtcatggccccttttagagcctggtaaagcctatgggacccttatcagaacactgttttcaacgcctatgatgaaatacataggaataccaaggaaaacagttaaatcgaaatagctatgaagatactaagtaaatttgtgatatgtcagtacatgtgtttactatagagtgtaacaggctctgttaggttggtgtaaaagtaattgtgggttttgctattttttctaaaaaccactgtaattttagagtggtgattaatgtaaatatgattttgagatacctataaagacttaataggatatgaagatatttatgattactgttcatgacaaagtcacaggtacagctgatactactgcgttttatcacctttgttagtaatttaaagaaatgctaaatttcatctagaaattagcgaaaataaggatgtcatttttcctttccaagttcacaggcccctgaatttgacacccatagatctcaggttaggagcccttataggaactttagcacaacatctaggaagggaagggatattggaagttttttgttttgtttttgtaagctgactaaaataactttaacaccaaaaaaaaaaaagaaaaaaaaaaaaagctttcccagttttcaatcctaaatggattaagagaaggattgatttagctttttatggcagattaagattgggaatccagaatgcatctaaaaggactagttacagaaagtttagctcaactttaatggagagagttctccaaagagtcaggatcacaagccactactgtttatcaagtacttgcctttcttctaggcaatttttcagatagcactgagtcaggcggtgctaagcatttttacccattttatcttatttaacccacaagacaattcataaaattaaaagtattcattttgttttacagaagaagatactgaggcttaattacaaatattttagtgactttcccagtgtattagagaaagttttgggttttgacagaaaacccaaaataaaagaagtctaggagtagactttataccaggattggtataaaggttccatggagtacccgggcaagtctttcctttccatgcttagccattcctgagtgtaacccccatgtccatggtccaagatgaccaccaggtggatagccagccatcatatccagaaggcagggggcccttgcactagagaagagagggcagagggcacgtgccagctatattgtaaggaggttttcctgaagctgctatacagcacttacaacttagtggccaaaaccgagtcacctaactacagctagctagctgcaaaggaggctgggaaatgtagtcctaattgtgagaggccgtgtttctgtttttaaggaaggagagggacatattcagtggaaactaacaaatctctgcattacctaaggcccatggtggagccagggctaaaatgtctggctgtctctgacgtttgtgctcttaatctccatgccgtactgacatagtgctcacatcttaaaatggggataatgcacttgtgagccatgtatttcagaggtgattgggatcatctgagttcatataggtaaaaggtttttgtgagatggtactcaagttatcactccacatttcagcaacagcagcatctataagaatatcttctgttcaattttgttgagcttctgaattaacattattgactctgttgtgcttctattacaggctcgactacctgtgaagtggatggcacctgaaagcattttcaactgtgtatacacgtttgaaagtgacgtctggtcctatgggatttttctttgggagctgttctctttaggtaaaatgatccttgccaaagacaacttcattagactcagagcatcttcttgaagtttcattggtgtcctgcttccttgtgattaacactgctttgcaaactgtgtctcaggaagcagcccctatcctggaatgccggtcgattctaagttctacaagatgatcaaggaaggcttccggatgctcagccctgaacacgcacctgctgaaatgtaagagccaaaaaatttttcctttaggtcacgttttcccttttatttttctttttagagacagaaacccagatgttgagggttttcataacacagtttgaaatgtcacttggattctttatgacacactggtcaaatgtcatttctgtagtttattttcataatctcttgtcaccaaaaatacagaaagtttcagtaatatttcatacatgcagtgttttatgttatctatatgtcagtccatatgtccagttgcatagccctggaattattactgaagttgctggatgcccatacatttgaaaacaagctgagggcattgaggagggatagtaaatggcccttgtcttgcaggtatgacataatgaagacttgctgggatgcagatcccctaaaaagaccaacattcaagcaaattgttcagctaattgagaagcagatttcagagagcaccaatcatgtgagtataccctggccaggcatagaatcccccttctcccagttccaggtgtgtcctcctcctcaggctttcagggtgaggactaacctcccaaccccttctctcctaatcttaggttgcaaattgggcttcaggtaggggaagtaaagcaatggaaactagttctttctgcccagccctcctgttctgagccaaagaaggatgtgagattgagggggaagggtggagagttttgtactcactggaagtagaagtttccataaggatttgccatgtttcctccctcatctcaaatgctggtcacggggtcagtattttctccctctcacatgtcagggccatgcatcctttggagggttggggtgatgtgaactagaataaaagcatagaaaagacagcttgttactgcagtgaaataagccttctgatcaaacaagcatagccagaaaatggcagatagctgtcatgcccacaagccatatagaatgaagagctgtttgaagttgggagatccctcccagtgatttgggaagtgtgggggaatgaaaactcaaatccattatttcctctctttttaagcaagaattagtgatactttgactcagatttttttaagctgctttctttcctgggctgtgtgcttggagctatcttttctttcctaatagcacaccactgataatttttgggttaaagcttgttcttctgggtgtcaaaacatgtttcaaattgaacagcattttccacccagttgctttgattcttgacaagagacccctggaagggccgtgggtttcccagcaaattacattggttattgggttgtagttgctggagagatttacaagccttttaaataggtaagatagtgcttggtgcctggtgtgcccttttagaagagctaagcttgtgcatgttttgtccccacttcttgtataaagttatttccttggaaaaatgaagggggaaaacaaagcttatatttgttttgtcagtatgacttgggttttggccacaaagttcttggaaaccacttctctcttaagagtttccatcagttagttgtgatcttgacactgtaagtatgccttttgttgctatgttcgttgtagggactgctgtattgactatgggcttgttttctccagatttactccaacttagcaaactgcagccccaaccgacagaagcccgtggtagaccattctgtgcggatcaattctgtcggcagcaccgcttcctcctcccagcctctgcttgtgcacgacgatgtctgagcagaatcagtgtttgggtcacccctccaggaatgatctcttcttttggcttccatgatggttattttcttttctttcaacttgcatccaactccaggatagtgggcaccccactgcaatcctgtctttctgagcacactttagtggccgatgatttttgtcatcagccaccatcctattgcaaaggttccaactgtatatattcccaatagcaacgtagcttctaccatgaacagaaaacattctgatttggaaaaagagagggaggtatggactgggggccagagtcctttccaaggcttctccaattctgcccaaaaatatggttgatagtttacctgaataaatggtagtaatcacagttggccttcagaaccatccatagtagtatgatgatacaagattagaagctgaaaacctaagtcctttatgtggaaaacagaacatcattagaacaaaggacagagtatgaacacctgggcttaagaaatctagtatttcatgctgggaatgagacataggccatgaaaaaaatgatccccaagtgtgaacaaaagatgctcttctgtggaccactgcatgagcttttatactaccgacctggtttttaaatagagtttgctattagagcattgaattggagagaaggcctccctagccagcacttgtatatacgcatctataaattgtccgtgttcatacatttgaggggaaaacaccataaggtttcgtttctgtatacaaccctggcattatgtccactgtgtatagaagtagattaagagccatataagtttgaaggaaacagttaataccattttttaaggaaacaatataaccacaaagcacagtttgaacaaaatctcctcttttagctgatgaacttattctgtagattctgtggaacaagcctatcagcttcagaatggcattgtactcaatggatttgatgctgtttgacaaagttactgattcactgcatggctcccacaggagtgggaaaacactgccatcttagtttggattcttatgtagcaggaaataaagtataggtttagcctccttcgcaggcatgtcctggacaccgggccagtatctatatatgtgtatgtacgtttgtatgtgtgtagacaaatatttggaggggtatttttgccctgagtccaagagggtcctttagtacctgaaaagtaacttggctttcattattagtactgctcttgtttcttttcacatagctgtctagagtagcttaccagaagcttccatagtggtgcagaggaagtggaaggcatcagtccctatgtatttgcagttcacctgcacttaaggcactctgttatttagactcatcttactgtacctgttccttagaccttccataatgctactgtctcactgaaacatttaaattttaccctttagactgtagcctggatattattcttgtagtttacctctttaaaaacaaaacaaaacaaaacaaaaaactccccttcctcactgcccaatataaaaggcaaatgtgtacatggcagagtttgtgtgttgtcttgaaagattcaggtatgttgcctttatggtttcccccttctacatttcttagactacatttagagaactgtggccgttatctggaagtaaccatttgcactggagttctatgctctcgcacctttccaaagttaacagattttggggttgtgttgtcacccaagagattgttgtttgccatactttgtctgaaaaattcctttgtgtttctattgacttcaatgatagtaagaaaagtggttgttagttatagatgtctaggtacttcaggggcacttcattgagagttttgtcttggatattcttgaaagtttatatttttataattttttcttacatcagatgtttctttgcagtggcttaatgtttgaaattattttgtggctttttttgtaaatattgaaatgtagcaataatgtcttttgaatattcccaagcccatgagtccttgaaaatattttttatatatacagtaactttatgtgtaaatacataagcggcgtaagtttaaaggatgttggtgttccacgtgttttattcctgtatgttgtccaattgttgacagttctgaagaattctaataaaatgtacatatataaatcaa

SEQ ID NO: 19 - DNA, 81759 bp, Mus musculus
gctcggtgcacttgggcgagagctgtagcagagagaggagctcagagtctagcgcagccaccgcgatgagaggcgctcgcggcgcctgggatctgctctgcgtcctgttggtcctgctccgtggccagacaggtgggaaagagcggcagacaagaggactgcaccctctgtgggcgcagcccgggtccgggaggggtgccacctgggtgcgtccggagtggtagctgttggcttttcccatgcctaccacctcgaaggtggtaggcggccgcgggactctggtggcccgcctcgctcacctgagctgagagacctcagcccgggtggtggagacccggggccgagggtcttctgggaacccaggcagcgagctgcaggctgcgggcgagtttggtgatgcttttgtgccgactgcgcgcgggtggcaggggcgggcggcctcgggcttcgcaccgagagcgtcctctctccgagcgaggtgcggccacggcttcctttttgttaaaagttgcgcgtgggtgaccgacgcctgggacaaccagcccacgggtcccggacacacgccgggcaaagttggagagccttttcttgcggccgctgcttccccacctcgggcgctctttgtgcacagtgctggggacgcaactgcagccgctctcatcgtgcgcggcgccacccgaggagacgaatctcgggcttgcttgcccccacccaactccgttttttgcacggggagcacgcggcgtgaggctctggggcgggaccccacgagcctgtaggtggcggctatggggacaacttgagccgggcgtgtggcgagcagccgctaggttgcagactttttccttttgtaaatctcgtgctaggggctcgcccctctctgcagccgcacggtgttcgttgctgccacgcgccagggagctgctgtagcctacgttggtcgccagcttctgggaatcagggactgcgtgcggggacgcagctgttcttgccacctcgtgcgcgctggaccaggaccgagtcagttctccccagctttggaaacctctggtttcagtgtatgcgacttgtaatcgcaggtggccgttttttttttttttttttttttttggaggggaatcccgagatccagaaaccctctcccacgtgatagccatactcagggctgcctggggaggctagggggtgggggagaaggggtaagctttctgcaaatagcatttgtttcttcaagctgttgggaaaatcttgttaccttttgcagggtaacttgggtctcaagatcttaaggttccggagctcctcagccctgcccctttttttgccaggtgtcgctggtgcactgcccgtgcaggttgcctgcttagtcctgaagccctgctccctcctaggtcattttcaaaacaaaaaccagaaacccttttaggttaccttgatgctataggctagagacaatctgcacgctgcaataaggcgtcagatggccagcatctctgtgacctgttttgagcccaccgctgactgcgttttccagatctcactccctagatgcttttgaaaggctgggagagggctttttttttgtgggggaagtcttgcatctggacctctgcgcgcacagaagaggggtcaccaagggtcacaaatgagtgttcagattcctaggcatatttgaccacttagctgaaaatgaccccagtgatcttttacgttttccaccttgttctgctttagagcaaggtggaacgccacaaagatcacagttcccttttgaaaacagaaacgagtcaatggtttgcattttccccctgattagtctgctctggccaataactttttggcagagggaatttgaaggtctgattcctggcacagggtgtgttgtaattcctttctctgtctctcccgtttcaggcctccttttcagccattctgcctccttggttttgtgcccttgggcggtcatttaaattgggagtgggtgtgtgttgggggggactttggtttccacggaaggtacttgaagacatttgcatcacgaaggatctgaggagttcacaatttcagaaagcagctttcttgtctaagggccttttggggtgtgtgtgtgtgtgtgtgtgtgtgtgtgtgtgtgttacggttttgctccaggctttgcaggaagcagttttgtgtttttgtttatgctgtaacctttggagggctaaccagtgcctgctctgcagtaacccctccttccggggcattcacagtgggtttacagctcaacaggatggtcctagaacagtgaatcagacctcctccccctccccacaccccctgttcctgcaggtgcaagtccctagtcattcatggtcattcacgcacctggcattctggcttacgatcctgctggagataatctgatagttccttgaagagatcctcaataattccacgtctcccccattctgggctctccccatccatccacacattcgtatgacgttataaatcatgtatgccatgcttttgcaacactcttcctactgtgctttaaatatcatatcatggatgtgttttgtgcatacttggggcttcacaatcagtaaatgtctgcaaggctccccatactgagggctttgcctgccatttctgtactcaggggcccaggaggttagaccactacagtgtctattcctattccaccattgttttccaattggagaataagtcacttgcccaaaacagccagtgaaggaaccggagctcagctccgtgtgcccaactgtgcatccattatacaactcaccagaatctgatgtaaagtaagacaaaagtatttaatgagtggttactataagtccatcctgttagaggttctgggggcccaggactgctgctttggctaagaggacttcaggtgacctgtcttagcacattttggtcttttcaatttgagtgggttaatttgctatgaggatccactactgtatagtttgggtaggggtgtttaagactatcatgaaggttttggtggggaaaagggaagataagttatctctaaaatgaagttgaaaaccattcccagcccccctcaaatagcaaggactacagcattatatatgtgtccctgataactggctggtgatctcagtggctgtttaccgtgtgaccaagtacggtgaaatacagtgaccactcaccgcagtcccagaggagactctcatcaggagtgttttgtgggcttccctgtcgctcactgaagttgcagatgttgttttggtcatgggtttttgccactgttgttgacagtccttagaagttactcttaggagtcttgagtcatttcctccaggatcctccagccgattaaagaaagggcgcgaggaaatgagccaaaccagccatgctgctgtccagagcaattcttagctggatctaggtggcaagagcacagtctcctttctccagaatgaattaggttcaagagttggcaggctggggtgtggaaagtgctgtagtcatgtgtggtaacttttccaaaagtgggattaaaagacatttatcgggatccaagtatgcaaaatttcatatgcagcttcaacagcaccagtcggtattttcacggggcaagcagagcttggaaggaagttgccagtgggagggagacattggaatggagggctaattaatccagcaaggctcttgttgaaaaaaaaaaaaaaaacgtaggagagagagagagagacctgggagcaagactggccccctggctcagattgctggctgtttggggggatggatgtgtgagccatcatccgacttcagtctctgagaaagaaagttgtttgaagtcagtagccagctcgtgggcatgcttgttcgactgactggatgcttctagaaaacacgggagacggtgcctactgagtgttccgacctgatcatttctccacctatcccatgcttccggttccctcttggctgtggcacgtgctcccgtgtacaacttgacggctaggcttccagccggtctacagaatgtaactaagtttgattactatttagggcaggtggcatcggagttaagagcttggtttctggaattaacatctgtgagttctaatcccagaatcccacttactgactatgtgatcagggaccagatgtttaaccctcctgagggtcgctttccacatctgtataagggggaagggggtcagggtgcagaagctggggggtgattgctggaggttctgtgtgaggtgcgcttagtgcgggagcccctcagaggaagtgggtggtctccagcgcacttggattttatcaccctctttcagcttagtctcttagagaaaaaaaccacaagtggtctaaaagaagattacacagcttgtactttttggcttttttgtttttggtattaagatgaaatttatgcctcgatgactaggtttttaaaaaaaaatctgctgatgcgtgctgccttccctacctctgtagttagcatccccttatttgacttcccaccaaagggcagagtttgggataaaagtttggggatcaagaatccaggcaaacccctcctctggtcccaggggccttttattagacataagtggcttcgcagacacagaattggaggggttttcctggactacttccccaggagtacaggaccctcacgaacttgcccttggctgggttctgacccacagcaggctggaaaccactgccttaacggctctgccactctctggaccaagctttaagcacaggcaaggctagcaaacactgtatatcagtttaacgaagtttatcaatcccctgctggggcctcacagggacagcagataggagggtgggagggacactgggggggtgcatatgcacgggggtgagggatggtagcatttttaaagagaggagcctcaagtctagttgggcggtattagcagagactaggggacagtagacacccgcacaggaggtcttactttgagataagacagcacgcacctcacagaaggggagcgaacatctgccgctgtgatagttggaagagttaagggagactgcgtgagatgtgcagatcttgaggaacatctagtctttggtctggtcagatggctgaaggttaaggaaatggaggataagaaggtagaaatgtggccccagattagattagcctcaaggaatggggagggagggcgtttacttagggttgagcttggtccagattgtgaagaaggccttgaaggccaggccaaggtggacttgactgggaacaaggtcaccagttggagccacctgctttgccttctgtccaattaagcgcagtgtggagcaaagccatgacctgctccaaaacgtgggctatctttatgataggaggtcaagatgaaggcagagggttttgttgctgttgttgttagttcgttttttgatttttaactaaaatgtgtttatcctaaaatcggcccctttaactttttggaatgcacagttcagggtagttagtacactcacattgttatgaaactagcattatcacttcatcttgcaaaactgaaatgttgtgcctattagagaactcctcacccaccccctggctggactgttctgtgtgtctggtctaagtagaccccacaatggttgccttcttctggttggcttattttagtaccgtagcgttttcgggggtcttctgtgggtgtaaggccagaatgtcatgtttatttgtagtttttgagacaggttttgccatgttgaccaaaccaacttaactcctaatagtcctgcctgtctctctagtgccaggaggacatgcatgtgccaccagacctggccagggttccctcctttcaaggctgaatagttttccttctgttgtatgtcggttgtttctctgtccacagctggtgggcacttgggctagctctaacttctggagactgtgattgatctttcaaggggatgctttggagggctattatagaacgggtgtctcacctcagaatgtgaggcgcgtgctcgtgggaaagagcacagaaggacaactcatttgtactcttagtggtaccggacaaaggatgggaagccctgtccgttagctgtactctggaaatgagagagaaagcccgagagacccaagggcatgcagtttgcacgacctgccatgcacctagaagggaaggagaactggggttcagctggtgtaggtccctgggagtagtggtggatggtggcgggtaggggtcacagggcaggctgagagtgagacgaggctctttgagggaaagagcaaggtactactgggccccactgggcttgggttacatttaactcagactcaatttcacagacacaaagcttgctgtcaatgaaattcttttttgggtcaggtccatgtaagaaataaatgaaaccccaaagtcccaagctctgactcaacgctattatgagaggatttgggggattatagagaactcttgtgttaagtgtgtcccggtcgtatgagagaaagagagatgtcacgaaaggaactgtccagtggaggcaggaataaaacgggtgttttgggcgtagacactgacacagagctgatgagcagtttgggaaagcaagtcctttgaaggcaatgtaaagaaattggatttattagtcctggcgatgataaggggaggaaggttggtttagtggccgttagtcttcaagtatttatagtctctgacaagaatggtactagttgccagtggcttcattgcttcagaagaaaactgggattttttttttttgaaaaaaaatttttttaattgtgggctgaaaaagactaccatggttggttaatctctgcaggagataggaggaaagccagatgtcattttgatatggtcctatcccgcctaattcagtttggcttgatgtcccttttatggtctgcaatccttgtaatgtagtttggaaatgggaaaatagctggctatgtttgtttcctcccttggttggctgtgtggtgtttctcagatgtagtgtgaagactcataggtctttggctccatggaaaacagccagtgaggaagccacagcctaaaaataggttattgatctgttgggggtcggtcatctaaccacggagcaaaccgtgcctcgaagtgagtggagtgccaagataagggaacggaggaagtctgaggtctagagagatccatcctcacctatgggtggaggtgtgctgttggggtctcccttgtggtggaatcaccctgcactgtggtcaggcagaaaaacgctcagctggatgcaggatgcttggcagggatgtaggacctgaatgcaggatgctcagccgtgatgtaggattcaggatgcagaaccacccttcttttctgtttttttgttttgttttgttttgttttggttttggttttggtttttggtttttcgagacagggtttctctgtgtagccctggctgtcctggaactcactttgtagaccaggctggcctcgaactcagaaatccacctgcctctgccttccaagtgctgggattaaaggcgtgcgctaccaccacccggctctccttttctgttgatggcttggggtgccttgctccttctgtggcttgcccatgactcttcgtcccatcctcccttccctttgggcattccacagtcatgattcaaagtcacagagtagatcaaccagggatctggagtaaggtgggagagaccccagtcctgcttgttcactagcttctggtcaataacattgtgtaagaatgaatgatgatatgtgtaaggtgggggggtctaaggggcatcagggatgggcagacccactggaatgccaggtgtcggcacatttagttgacagtctggtcatatgccttacagctgggttagaaggcaaggcttcactccttgagtagaacggtgggttcagaggcattctggggacctgaaataaatcttgaagagggggcctgccattcagtcagtgtctgaacagcaaaagtgttgagtgagccaagaggctcccgtagaaagacactctggaagatgagggtgcaaggtgatagggctaagctttagggtacctggatttttcagactccttcagagatggaagcgcttcccacaatgccatatgcgatgctttttttttttttttttttttttggtaaatgaaatctggtcgagtaattgcctattcagagaaataacttttaaaaaatggaaaagtatgcatcgtgcttgtgcgtgtggttatgtctgtgtatgtatcatgcaaatccagttcgggtttgaactgagttgtttttgagtccgtggctaattacacggctcctcgttgctactcccagccatgattacagatatctgaacacctgacagtggcaaagagctgacttcccatccttcgattattgacaaaactctagtgagatgagaaatagggtatgcaacaggttttaaaagaagcctttttaaaattttgaattcttttgaacttgcaaaccaaaggatgggcaagaccttttgtaaggtctttgctggggctggcatgcaccaggtcttacctgattccatggccactcctgtcttaggctcttaggtatactgcgggggcctctctctaaaacagtattggggagaatggtaggtcataggcagtccatatatccaggaatgagcgcatttctgggtgtatggactgtactttgtttggagtttactggcagagatgggcagaatactgtcacctaggagaagatgtaggtccttgacccttacctgggaataatacctcacccttgacctagagggtcactaggaaatgaaacagaggggatcctcttgtctctaccttcgcctgtgtcttcagtctgcgaggcagaacatccagcttgcctcagatgacttgaggtgtttcaaaggcttaggagggggcactcccaaacgttctgacactacctgtaatttgtatataatagtctacccttaagtggagagattgctctgtgcctgagaacaaatgacagggtggccacagtggacttccgcagcagtgactgtgtctctattgggtggaagaattcaaagaatggaatcccagtgcagatttggggagagaggatgtactgtggatattagaagtgttcaggctagtggctgtcatcctacaaggctagtgtatgcttaaaagggagaatagaattatattttaaaagccaagactcttctctgagaaactagacaggtattttaaaggtaattgttaggtggtagaattattctaaatgtgtttccacttccatcctaattgtcatggtgtggatatcctccattgttgttggaaagatttttttttttatttaataagtgggtgatatttgatcgactgataaataccatgtggactggtttttgttttttgtttttgtttttaatctacaaattctcactaagtagctcaggctagcctggtacacattatgctgcccgggtgggcctcagtcccctgatctttctgttcctcgtccccagtgctgacactgtaagcccatgccgcacaaccagctttggttttcttaatatgaaggcattagagtagctagtagcaaatttgtccttgaatggttttgtatttattttcatataatatgtatgcttaatgcagggaaatagtagggatgttctgggctgtaccagaaccagaaagcatcactttgatagaagaggacccaccgccccagtttttaaaataagcttagcatatgtagaaggggttgtgagtttcttcttcagatctgaatgtgttgcctaatttacatttccagcatttttcaagggacattaacttaaaattatcatccagtttagaaccgctgtctccataaggggctgggagagcgagtgccagcgggcagggagcatctcctgacacaggaagtgacaagggacagcagcagtgtcagatgctggccagcacagcgccttctgtggtgctgctcttgaacagagccggtatgagtagctattaaacttgggtggggggatagcagtgaataacccagacctggggcttatgttctagtgaattctttcttctcaagagcccagaaaaaatccgggcatggtggcgcacgcctttaatcccagcactttggaggcaggcggatttctgagttcgaggccagcctggtctacaaagtgagttctaggacagccagggctatacaggaaaaccctgtctcgaacccccccccccccccccccgcaaaagagcccagaaaagcagggagggaaagagagtaaagaaagaaatgtgaaggctcgtcttacaaaaatctgctgaatttagacttaatgaccagtggtgtctgtggttagtgaagggacaagcagaggaaggcctgagagggcaaactaagagggcagggacaggagctggacttgcaaggatggagtggaggtcagtgggaattttggggtgatttggggccactgccttcccaggaaggactgaaccaggacaaatcagattgtcatttgagtctttgattgtcatataggccagggaccaagtcagaattgaaacactggggcattccccaccttcaggattttggggcatctttagagtgcgccagggagtcttgtcagtctgaagatttggaaccctttgttctagaacataccagaatgttcttcttccatagctgagggggatgtttcagatgttcttttttttttttaatctttatttaatgtatatgaattttatatctgcatgcatacctacatgccagaatcccattacagatggttgtgagccaccatgtggttgccaggaattgaactcaggacctctggaagaacaaccagtgcccttaaccgctgagccgactctccatcctgcttcagacattccttggatctataggagggtggggagaggggctcattctataccaaaattaaaacatcctttcattttttttttttttatgaagaagctgggcatgaccatattaaagcctacaagactgtacttagacaaagtgcagcttaagtcccaagcctgttaccatatctggtcaggatgaactaccagcatggagatgtcacagaatgggacatagtgaggtttatttatttattttttgcatctcagcctttagaatggcctttcggatacccagaacgcgttaagctctgagctcttcagttttaaaactgggatttactgaactgaggattgagacttggggaatcaggactagaagtttgatccgtctgtccttggatggtggacatctggtccttgaggaggatcatggtcccctcttggctggaactgggaaggacatccctaagttggttgactggcctagttgaaggttgtagggaggaagcctgaggtggttgccctgtggcttcaagcactgttgatgaattcactggcattggatatggatcgcacatgcggggttttactggcctacagaatcatttgtgtgaggtccttgctccgtttgatagcttgttctgattcagggtagtcttcattgttgggacctactggttgggttgagacttgcagggcctgtgtttaactagacctctgttcttggctttctatagctgtgatatgcaccatgaccaaagcaacttggggaggaaagggtttatttatctcactctacaggttaacagtctatcatctagggaagtcaaggcaggaacctggagacaggacctaaggcagaactgtggaggggagctgctacctggctttctcccgcctggcttgcctggcctgctttcttacacagctaaatggcaccactcatagtggccgggggccctcctacagcaatcagtaagtagaaaaaaagcattacagacatagccgcaggctagttggatcaagacaattcctctgtctaggtttcctctccccaggtcccctaggttgggtcaagttgataataaacacttgtcagtataaccgtatttaattaaattaactatcacttgactgagaaagagtaaacccattttgaaaaacatcaggtagcctctgatctctattgttccctgacccgtttggaaactttttggcagccatttttatttcaacatggaggaacgttgtctttgttttatgtagcccaggctggcttcaaactcagtatgtagctgaggatacttcaaactcctggtcttcctgccctcccctctcaaaagccgatactacaggtgtgtgtcaccacatttggccagcgtggtttttttcacagtggcatttcaaggacaacatagtttgagctctcagatccacgaggccagtcgtggagcctcgccccttcccagttcaccatctcattcctatgaagcttgatttccatctagaaatattttcagtatgtagctctaaaataccaatttcctttcgtaaacagtcacggtgtcacatctgatcactgcactgacaccccaacctcccaccccacccgagccttccaacccatgggggagggacactctattcaagcaggaaaacaaatcacacggctctaccctgctgtggaatattcagtactcacctttcccctggtgaacataagtactataaaaatgtagacaagttttacacatgtttggctgacgctgagagcaagcctcggtttggaggtctccccgacgttgcttcttggtgggcttcattctgccttcgctcctgtggaagaggctgcgtgtttgctgattgcattcctctaacaattagcgtgcttcagtgtctgcatttcctgtaagctgtcgattgagtggtggatcgtgatcaccttttgtttttaaaggtagacattgtgttctctctagtggacctttgagtatttgcggtgacaatgatgttcttctaataggtgcctttagacctttagaagcactcctgtctgcctcttcccagagctgttttctattggttccctaccatgagtgacatttaaatcggccactagtgtgctctctgttccttttgtgccaggagctgggggtttgaaggaagaagtatccacccccccacctccccacccccccagctaattatctgtttgcagaacttgctctctcaggtttccaagacagggactcacctattctccactatcactttcttttagtgccaaaagtcagcctgcatccagtgttgggggcgatgactggtcttgcgcctctttctgaagggatgctctgggaggcatctcaatgatgtactcacagcagcttgtctgtagtctttgctggaaaggtcacatgtctcatagaaagcctcagccatcctgtccttgctcaggtatctttgtatctttatttttttcctgtattgtctttttgccatcaagtgctgtcaaagtcagatacactaatatggtttttctctgcctctgatttggccacacatttacctagatacccacaggaatgctttctttactcttcccaggacagtcacttttgagagttcatcttttcagagaagagaccacagccttgacataaaatcccaagcatggctttcattttccctcactaaagagttgttgaagatcagaagtttttattattctccaatggcttcagagccaacagcagcatatgttggactttctttgtcttctagacctaccatgttcttggaaatccttttagttccattatcatttatctagagtcacatttttcctcacactctgatcttctggcctcagcctcgcaaattctgggattacagcaagggccattgcactctgagatacattcttgtatttgttcttgtgctctgtactttggtggtttgggttggttttgcttcctgagacagggtcttaccaagtatccctacctggcctggaactcactatgcagaccagaactcacagagatccagctgcctgtacctgctgagtgctaggtttaaagccgtgatccactatgccagtctttgattttttttttttgaagtaggtttcatgtatgccagcctggcttcgaacccacgatgtaattgtgggtggctttcaactctttattttccttcctggatactggaagttcaagggtgtgccaccagctgaaagactttactttctacattagagatgtcccccagctttctcatttttcttaacaactctttggaatgcagtagcagatcttttggggagggcaggtcaatactgtctcgtaagtatggcagaccggagctctctgctcttgttttaactaagcgataatcttactctttcggcctctcctcagtccctctctccagaccttccttctccttgcccctcttctgtccttgaatcccatccccagctctgtctatctccctttgtggggcttcatctggggttgtgacttcttagggatcaacctctctcattccagaatactccagcacactgaatacacatgcgtcaccatctcctctgcacttccggtctgtgtggttctcctcagaataaactgtgtgacaagctgccatgtttgctgctggtagtttgtcctgaccctcttggaggcacacagtagatcacacagggctgtgttgtcatattttgggctcccagcactcaatcacattgggttgtgatgtcagaccctgggcgccccacacatagaggcactcagtgctgtgatgtcatactctgggctctctgctcattggttcacacagtctgtgtgatgtcatactctgggctctcggctcattggcttacacgggctgtgatgtcatactctgggcggcgcccacatgcacgctgaatcatatgcagatcaatgagtcatctgaagtatcgaattctgcctgtttgctcagttttgagactgaggttcatcagttacattgccggtaactcctgaagccagaacagcccccaaactctttaaagttaccttttggttttgttaatttatggctttgccaagcttggaccaaagtgaaatatgaaatgactggctgacgcctttgaaaacacaatcttccttaaaaatataatttaaaaacgtttgtcgccggggacaagagttgtgtttgtaaacgatctgaaaacagatcagtgtgaaagcaaatacttcctgcccctctgacatcagctgtctgcgctattgtttacaacagagcattatggtggaagtcagtcaggagagcaggaagctcgttagggagttgtctttgaggaacacttggtaagaaccagtgttctttgccattggctgtctggtaaaggattcttgagttctgaaggagacagtctttttttttttttttttttttttagttttgaaagtgttaacaccgcgtctacatggttaataccatataataaaggtatcactgctgcctaattgggtacatttccactccctcctgccccccgtggaaaagtttgcatatttctaattataatcatttgaaaaaaaatgttaccaggggttgacatattcatttaaatttccagaaatctcaaattttcttcgtccgatttgagtctcttccacttggtcttgatttcaaatatgctaacaggttcctagccaggcgtggaggtgagcaccttacatgcctttaaccccagcacctgggaggtagagacagggggatccctgagctagaggccaacctggtctacataggaatgccaggaccacataggctctgtcccaaacaaacaaacaaacaaacaagcttacaattctagaatgggcttcctttccctgtcgtcagggatggtcatattctaaagctatgagaaagaactagagttttctcagtggacatactggatgggttgttgttgtttattgttgtatttctcagttctagaaaacagttcagtttcaggcatttttctcttgttccttacaggcactcagatcagtttccacaagggagaattccttgaaaagggatgcaggcttaatgtgtggttctgagtaaatatcaccccagaaaaattaagagaaaagtgaacactcattaagcaaattgaccaccagcaagcgttctgatgagtgttgaatcaaatctgaatgcacccatcttgtccattagtgtgcttttacaccagggcaattgtttggctctaattattttctattttgcgtgtttgaatgtagaatggctacagaattaactgttgccgggcaattatctgattagcaattgaggaaaacggtcactggtatccgaccattcaccaagaaaagctgctttggtgtagggctctgaggggaccctgaaacagactgttgggagccagacgtttattggaagggttattcatgctacatacatacagacagacaagagcatggcgagagctcacaggagagttcaggccccagtgtcgcagacagcaagatagggttctgaaagagagagcagcctggtcccttttcagagttctctgagggaagctgcagcaaggctctgcctccctcgaaggcaaagtttattgctatttgagggaggcaaccctcctgttcaaccatgtaaggggacccctgcataaggggacccccgtgcttcatattgcaccagagtgggctaggaggcccccagcccagggggagcatggcaagatgggggagtgccaggccctccgagtcactgagccagattgaggtctgatgcgctgcagaagttgtctttgccaccagtgtcactgttctggagtcctgtagctgtgactggtgcattctgtaacatttcccacttgaaagctcggggatttgagaaatctgtgcgcgcacgactggctgccaaggcttgtcagggggacccagcgcgaggccgatttctaggtgtaaaagccaggcagatttgctcactcaagaaaatctgtctctgcaggttttccctgagttccaagatagagatcctggtacggcttcttgctacactaatggctggtgtcctgagtctcaggggttttgggttttgtttttgactgactactgtgtaggtcagggggctaccataccagttcttcaacggtcaggaccagccacaccaggcacgcctgggaccaggtaaagacgccagcccgctctctcccccaaacctgctgcactggaaataatagcagcatgggtttccagtccttgatttaataaggccgtcagaggaagctgctgcaggctgaaggctgagaacccccagctatgagggggtcagaatgcctgggcttcatcccagcacaaggcccagggcctcttaagtcccccgatgctcagacagggtgcagttctcggttctccttctgacaacctaagaatggtagacgggagtttcagttagtccagacaggaaagcagacagctacagtactgaggggctgtgcagaggtttccagaagcatgcgtgtgcgatgagggaggcgaagccaaggccttgctgcaggtggtattttcaaaggataaatagggttagtacctaccttgattccaaccttccagagactacacacccagtgttgctcacctatgtgggggtatgaagatagccccttgcggggcctggttcctactgccacacacacttgcctcccgctctgcacttacagctgccctggcttccgtaaagatatgtggcttcctggcctctgcttactacctggggtacagagcacggtgcttcccctgacactccttggtgcatgccagtttctagctcctgtgtctcccttcacgatcctcgtccacctctagggtgggtcaggtcagctcccttgtgcttctcggctcttcacacttctcacacagtaattatagaactgtgtaattgttggtttatggcccagccaggagctaaatataaacagcgcgggtgggcatggggaggtcttgtacactgttgctctaagggcccagcacacagccagacttcagtgtggtatttttgagtaatggggatggaggtaaggtctagcctttacccttatttcaagaacacctgagcttaaggctacatgatagcgctctgattttgctgagttttaggaagggctaactggaagctggtgctgctgcagtagcgtcttcttgcttgcttgcttctaagctcagttctggctctgggatgcaggagagagcaggttctcgagggctagacttccaggagagatggcagaaggagagaacctgtacttggagatcttggagatgctgtgatgcagggtcagaggacagcagcctgcactggaaagatcctgggaaggttgtcatggaaaggagtgctgccttactctcccagggcttctgagaacggctacccactttgtgcccagaagcagtgatgaggtatcctgttcttcccacacagtaacagaagagagatgcagggactagagagatggcttaatggttaaaagtgctttttgcttttccagaggagtcagttaggttccagcaaccagcaactcacaaccaccttagcttcaggggcccaatgccctcttctggcttctgagggtgtctgcacacagacaacagacatatggacagagacacagacatacatacacacatagacacacacacacacacacacacacacactgaggtagacagacagacagacacacacacactgaggtagacagacagacagacacagacacacaccaataaaaatgtaaagaaagaagcaccattggcctgttaactggttttgctctggctaaagctttgtatttactttctagaaggtgacagcttggggactccatctcagcagcagcagctgcagccgtagatgggggcatttgtttaaaataagactcagtctcattggtctttatgagaggcattagcagtaacattcacgcatgtcacttataaaaacagcgtagccttaagaaacttttttttttttgaagatggtatttcaagacccagggagttaaaatgctcacatgattatggaaatcttgctttgagtaaagaaactagtaatctattgactatttgaaattattgggtgtctgtacacatactctgtttttccaatgctaaggtttgaaccaggggtcttgcttgtgcctgctctctaagcactctgccactgagctacacaccgcatgccccgcaacatactttcttatagctgttgtaaaattctgctttggttcaataaattagtagaacagtcaatttaggaacaaaagctgtaagattttaggaggcatgtacggagctgactagggcggttggtgccctcgagggatgtgatttttgtttcccatgtctgtagttttaacgtcttcatcaagtaccattttcctcctaacttaagggaattctgtatcccctttccctccccctgccttcctgcttcctccgggctccaggagtgttttctttggtactttctctggtacttcaggtgccactaggtccttatcttctcgctgtgacatcaccagcagcattacctaggttctgaagggaattagagatggtgcgaggatcccaaacaactctactcatggctttccgtcatctcctctgaggcctggggaggccagttggcttccccaaagcttcactgctttggctccggatccctgtgtggctctgaaacctacactgagtgtccctgtattcctgtgctgtcacctgcttacccaagctcagggcagcacctggcacttataccctctggtcaggctttaataagtgctgtataaagttacaaagttggacaactccccacccctacccttctaccaccaccacccactcccaagaacttcaggccacaactgctaactttttttgatccttgctttttttctggggatgagcgcatgcaggccacccaggctgtgcctctgcccttgaccagagactattttcctgccttctgagaaggccttccaccaagaagggtgcttggagttcctcagggagcccctttaagccctgcgagttcgacacaggcttgctgtcttcctagaaatctccagcgcctacacaacagattctcctctttggcagggtaacgggaaggcgagtagagatggctcagtagggattcgccccccggcctgttacccagggctgcaatgcactgtcgccccggaatagaagtcctgtggtagaacagttaacaactgcctctgccctttgctccagcaactgcctgagatacaatttctagtgggaaacatgactgctttagtccccacttctgtaagatgacatcttgacagtagaaacagaaggaaattttcctgtttgcaagttgtgtgggaaaagggaaggtacaatttcccttacttgacaggttcctttaaaagtaggttttagagtatatttctgagtaaaatgtattgacttgcccattatgaggaaaattagcatattcatctagtttagtcgagtataattaatgcgcagcatctctcaaagctagaaagtcagagaggcccctctccagagtgttgatcgcagttgaaaatgcctcagggaaaccatccaaatgtcaggatggggagaaaaaaagagaagtgtggcccaagcgcacactggagcattagtcagccttgaatagggatgcggttctggcacgctacagcataaacggggctctgtgactctccgagggaaacacggaagtcacccaaggactaatagtgcatgcgaactcttattccaggcacctaggaggacagattcatagagatagaaagtggattgggaagactcagggagaaaggagcatagagttaccagctggcgggtggggaagacaggaaacgagtggaagtgacctgtgacagtcactgcccagcctcgtgaatgtccttactattacctctcagctgcatacttacaaatggttaaagtggtaattaaatattacgcatattttatctaatacatttctgaaatgccccgattgccatatgcgtgtacatatgtatgcgtctgtgtgcatacacacacatggatgtgtgaaaatgttaatcatttcttacctaatgtctcattcgacaccattagaacttgatgctggaggactggaaacagagcctaaggtcccccaagctttatttgcagtcatttattttattttattttattttatattttggcttgccaccattactaccttacattctctccggggcctgcaggattggcatgtggcagaattctaagactcctgagagaacatggcaagccgagagggcaccaccttatccacacgcacaggccacgcctctccctcctgacctggatctgtggccaactccttcgtagatccctgcaggccccgtgtgcgccgtgcagccagggaggcagctgggagtctggacatgctgaactgtctgtggcctggagtctgactgtcctgctgtagcgcgtggctgagctgacccttgcctcccttcttgacctgtctcctgctttgttctcggtgttctggaagttaaggaagtcggtgttgaaagatgtggacagacaacccccgacaccatccccagccaatggccgcacagatgatggccgggttcttgttctggtgtttattagagagaccactccttagtgctgcttatctggttcacattacagtaagtgctttccagaaatcaaaacacggaaacctacatatttacagcaggggctgtgctgggcgatggggaaaaacccagtggaaatgagaaagttcctccgctgagatctgcgatggagccacatagactgtccatgtcaaacccagggcttgcctcattcccccaaggccaggttcataatggctggggagagcttcctctctttgggcgtctttgagccagggtcagggggggcgtcctgtttcctcagacactcatagttggatttttcttaggataagcaagcagggactcttttaaaggaaatatttttcttgggaaaacctgaacttctagaaaccgtatctggaagaagttctgaaaaacaattagttaagaagactcctcctcattggtgtgtgttggaccgggaatcactgacctggtggcacctggttatgccacagggatttgagtaccttccatgtccagccccaaatctttaaggagaaccctttatctttaccccttgtgttctaagtatttgattctgggtcccgggtttttcaaaataatgtttatattatatcctaattatctttaagttttatctatttttactttgtgtgtatgtgtaagggcatgtgtatgccatgacacacgtgcatggaggtcacacgctaactttaaggagtcggttctttccttctctcttgtggatcccagaattgaattcagatcaggctttccagaaaatgccttatctgctgggcagacttgctagctctggaattttaagcagacaccctagagccatcacctaagtttcctgtagtggtagaagaagcttagagacaggtctcagctagcccagctgggccaggagttgatggatgtcagggatgaccttgaactcctgagactcctggaggggctgggattgcaggcccaggggccccaccgcagtataggaagtgctccggagttgaaggcagggcctttggtggctgagatggactctaaccactgggctacaccatcagcaggtcctggactggcatagctcttgagacttttggactttaattcttgggtgaagagacttctgtcagtagaattcagaccgtctgtgtatctgtctccacctggggcagcccttcctttgctagttgcttgaaaacaaacgcaggtcgttatgggttttatttaaaatgtacaactattaaatcatagtcgaaccaagcatttcacattttcaccctgtccctcaatcagcgcgtagctctgcttgaaagctggtgtgtaaagccctcagagtccttttcagtcccttagcagcggcagaacatgacatctctttgatcttgggtatgcttttcaaaaggcacaggcagcctggggcgtcttctttgccaccagatagatagtgtttaagattttggggtggggttagagcacaccccactaagatgagagctcagagaattggagaatcgagttgttcttaacagcagagtgagattggcgaggggttggaggtggggtggggtacaaaagccaggagctgggtgcagctgggcccgcagctggtggccctccagagacagagatgggagatcacctcagctcaggcattggagaccagcctgaacaacatagcaaaattttactgataagattaaaacagtagtaacaatcaaacccccaaagctgagaagcagaagcgcaggctacaggaaaggtgatctggggaggtgattttctagccccgggcctgcccagtggttagggcagaaactgccgaagcgaggcagaggcaggaagggttcacatgcagcagagcagttgggtaggaggggatggagaaggtagcctcccacccctggcttgcttgggcacccctgtttgcttggggcttccttctctggcgctggaggactacgcttcttccaagacccctgagattgccctcaccccagcctcttaggcaatgcgactgcaggctgcccctgttacttttgtgaaacctggccaaatccgccaggcctcactccaccggtatttctccctttggactcctctctcggtcggtcccagcggagagcctccgtcaactttgtgctacagctaaattttcctcaaaggactcgttccaaaatatgagcggcttaatgtgtgtcttaccctaacttgggtgtccttgagccagtatgggctcctgtaccactaggccacatgcagcattccccgagctacttctagcttgtcggagctcttcaatccccttcctccttcagggaccttgggccttgccgtctatagctctggtctttgtaatctaccccaagccccaaccccagtaatttcacagacactccaggtaccaccactttggactagacggatccaaatatccctaagtctatttttcttctaatcacttgacatccacaatgttccatcacagaggcctctgacacgagtgtcatcttgtctcctcactgtccagggccagcttgcctggagtccccttaagcacttagaaatacggtcctccagccatcttgctcttccttgtttctcaactgactttgttctagtctcattttctcagggcagactccctcctgtggaaaagcaggtcctgggctggtctccccaccctaactaacccccagctcgctgctctttttctgggggggggggggttgtacttgcgctctctctcatcccacccgcagcctggccgtacactttgttcaacttgaactctgaactcccggaacccctttctgatctctgctgacactccatcccttttcactttaatcagttcactttaatgcagatattccttacgttacaatagtaggaatgttgatttaaaaaaaaaacttagaagttataaatgtatttaattaatacactcaatctgtcagatatcctagcttagctgagcctgagactcacaactgttagcccacagttgggccaactaagttgagcccttgttaaaaaaaaaaaaaaaaaaaggcacccaaacactccatgcccagtttccagtgaggatggcttcttaatgttcctaaggtgaagagccaaggatggatagcccttttgccagcactggcttcattggtctctggctgggagcgtccctcctccagctgggtgtgtggtaggcgggtgtgctcttagccctcagcactccctaagttaaatagcggggctgagttcctgctggtcctcggagacccagctcacacctgttgtagcaattgcaggcatgcccactttattaggtttactttctcctcctctcttctgccagctagctcgcttttaagccaatcttgacagatacctctctgcaggagctgcttttaaaaacaccctgcaaagataccttgtcctttgttttgggagttttgaaactgacttaagcggctgcattgctagtgcttgaaacatcaagttggctcataaatccaacagactccgcaccaactcaaaacgtatcacgtctctgaacgctagacagaaatttgcattagacaaggggttgtttcctggggcctgtggcctaggagacaggagagtttgtttattgtctacacctctatgaccttggtgatgaattccgtcagtactgttatctttgtactactgatttaaatatgacccagaaagctctttggagacctcagagtcttgtgtctgtgtgtgagtgtggtcacaactgaccaggaagatactttgaaaggcaggtagtcttagtagtttgagcataaagtgatttgatttatttcaaagcacatgctaccctaagtacatttgattttttttttccttttagtgtacaatatataaaacaacaggaaaggatgacggtctttgacactacatgtagcaaacatacccgctgtggtgtggtgtaggatggtgttctcggttactggcccatctcttagacacaccttctcattccctacgcctacttgtttattgggcaccatctgcattcctggactctaagaaacttgactctacagagactggtgctgactgtcctggaggctgagcactcactgcaggcccagcccctcataggcgtagcttaccctgattccctgacaccatctactttgaagatgctctcttcctcaaacatctgtgtagattccccagacttgggtatcatggttgcttcccctggaacctttcttggtccttctgggaagcccaatagctgctcccctctttgatggaacacattgctccttccctccccctctctctatttcattcatgttatctgtcttctgtgcagggctctgggttgcccaccagcaccgtcttttagttatgtgatagattcttgctgaaggcattggcttctgcagagcagcgtgcagacagacagtgacctctgtgacctggcttcccttagtgtgcgggtgacccagagtctccctatccctaggattggcttgagggcccatgtgacattcactgagcccttccttactgtccccagcttagttctattcccagtatcctctttgtaaggactccagggtgttgtaggtaattaccaggattctttcatcttggttcttacccactctattcctatggggctaggctgtaaaagtctgtcaaaaacaaagtgacactccggccgtcagactttctttttactataaatgtaactaagcacagaaactgaggaacatttgagctacaaggtctagaggctctgtcttctcctggcctacttctccaaaactagacttcgtaggtttccttcccaaccatttctttatctggttccttatatttacctacaaagaaggaaagactttaaaatgacttcctcacttttaaccccatctagaactccaggcgttgcagggattttttttttcttttttttttttttttttttttttttttttttttaaaagaataaggccctgggagtcaaagctaacaaacaggagccaaccactactgcaggggctggccagagactggctcagccagccaggaggattcctggccgggcctctgttttgttaattgctacattgtaacaaacacaggtattacctttgttttgttttgtttataaagaaaaaaaatgccacacaacatactgtatcttcagtagggagccaaattcttttctttgagatttggttgcttttgagtttcagaggagttctcagaggtgttctgagcagccgtccttgctgtgcatgctccgtacaccaaatgcaagctctgtggattgtaattcggtttcctcccaagaagttctcctcaggcgtgctgaatacaggctgcaaattggaggccccctctaatcttaatctaatctaaacgtttcacccacattaaatccaacagtagatctcccccagtgaggcaccccttacgtgtgtgtgtgtgtgtgtgtgtgtgtgtgtgtacagcaaatacttcatacatgtaactgatccataatatactatctgtatgcatcctggacaggtttgggaataaagtcagatgactcaggcagtgtgagacttagttggtcaccctggggcacaagtgtcttgggctcccacttctgtggagtcagcatgagcttctagatccttcagctcagagttaaaaggcctctttcaacacttcagcactggctgcttcggacagtgaggaattcagggtgttttgtttttgtttttgtttttgttttgttttgtttgttgtttttccaattgtttttaatgacacaatttaagccacccctggagccacacctagttttagctaagagtgagccagggccagctggagaaggctaatgtggttctggtccacgatttttgtttgttttattttaacttcaggtttttttgtttgtttgtatgtttgtttgttggcttctttgaaacagatttttttttcttctgtatagccctggctagcctcacactctgagatctgtctgcctttgcctcctgagcactgggataaaagacatgcaccaccacgcctggcttaattttagtttagttttttttttttttttcttttttctttttaaatgatggtgcaatatactcaacatggaatgtgctatcctaaagtatctagttcagcagcgatgagaggtacacagtgtgggacagtcgccatcccttctcgtttccagggcctctttctcctcctgccagagtggccagtgataaattgagctgctctccccgcccctccagcctctagtaactgccactctgctttctgattctgattttcccaaacccaggtatttcatgtaaggaaggacatgtatatttatttatctgtgtcttttcgtgttgtagctcaacagtacttcattctttttttatggcttactaatatttcattgcattaacacccaacatcgtgtgcttcatctgtctgtagacagttgtgctctttctgcctctgggctccatcgaataatacaaaaatgctgtcggggttgtgtctgagtccctgccttgagctgaccggattttggataaattttacacagtttctagggaagccactgtgggtgcggaggatgccttgatgtttctttggcaccagtgcctaaagcttttcatagttgtctacttatgtgccccctctgtcaagggactgtcattgtttgtttgcttgtttgttgttttggtgagcaagagcccgcactcagcaaggacttgtaagttcttcctggagagcagctgtgtttgccatctgaccctcctttttcgttagattccaatctctagggtgctgagttttatcatatgtcgttttcttttggttcattaattaacatgttcagggacaagagaagaaatctcactactgtccatagccacacatgatgaaggatgcgtgttcattcagtggtacaaaaatcttggtgggagacaaaaggcagcccaataaactcatggctgaaagcttgcggaattgaatatcaggtatgcacatcaaaatgtgtgcttcaaagtggcctcatggctcagctgaaatactgagattgtgtgggtgggggttgggggtggggaggtgggggatggggtgtgcatgggcacacacagccctgtgcacagaggtcagaggagggcctcaggtgtttcctttgctgtttatcgcccttctcccctgagaagtgatcttttactgacctggggcctgctctctgggctaggccagccagccagagctcgagggcctgggacctgcctgtctctgcttgccagcctggagttatagcggcacactttcgtgcctggctttttctgtggtaatactaaggacacaagtttaggatctcaggcttgtcccacaagccctcccatccctgagcatcccaataatcctggagtatctttctgggggatagtcctttaatgtgaatctctatttttctaaaccggaatctctgtcgtcgtcttcatcatcatttgggaggctgtgatataacaacactgaagatagtttagaaacaaaacaataaacataaccttcgcttgtatcccaataaaactttttattttatagtgtgtatgaagattgagcccgtaagtcattgttgaaaataaaaaccctagatatatccagcggcaattatttctaaatttcaccaagtgacgcaaggcattgactaaattttttggattaagttttctaagaatattctgtattcactgtagctagttagtctgtcctcccatcggtccgtctctgacgttcggcgagggtttacatcattggcatataaggaactgaaacaatagcacccccactgttacttttaaatgcttccttcctaggcctctggaaacagtcctctttgctcctatgtccataaataggccgggccattgagatgtggagcctggtagcccgggctggctcttgtcatcttacagcatctcctggattactggtgcctagtgacccttgatggctatggtccctgtcattattgtcctgggtgacagcttttgctcgagagcaacccttcgcttgaccccatgggactgtggttgcagtccaggtgatctgttggttggatttaaacagagattgcagctggtcacgcatgcataagcctgcagaagacagtttgagggttcctttacagtgccttccgtctgtccctgtcttcgggccctcttcctcctgtctgtatgcttttcgagctccccccgcatgcctggctttgtggccatctttgcttgtatatctttttcctccatctcacactggaaggagagctctgcacttgatactgcctgccctggaacaaggagacattcccagaccagtgaaattgtgaccttgacatccaggagtgatgtgtgtgtgtgtgtgtgtgtgtgtgtatgtgtgtgtgtggagagagggagggagggagggagggatggagggagggagggagggagggtgggtgagttgtttgagatttgagacagggccccactctgtagaccaggctagtctcaaactcatggacctctgactgcccctacctctcaggtgctgggattaaaggtgtgtggcactatggctggccggatccaatctttctgttaccatcttagaggacatgtttttggtctcactgtgtggcatctgcctcaacctgcccttttttccccccctggcattttctaacgcatggtcttgcctcattcctttgctttggcctccttcctctccctcctctccctccctccttttcagtgatttaaaaacaacaaaatcaacttcttcgtggctttcttacctgcttttggctggtagaacccttgtttttttttggggggggggttccatcctgaagtcattcctgactggtgatcactctgcagattggcccatatgtatgctgaggtgtgggggctcttaatggtcttccttgttcatcaaccttagctaacatatatccccttgggccattttccagccaggtgcctcgcacagggctttctgggagggctgtttttcttgctgttcagtccttggcagccttgtcctccccctcatctgataggaccaaggtccagcccacctcttcttcctcagtctaaacttctagctgcatttcatttactctggtgcttgagtggtgccctttcaaaacattttttatttattatcagtgagtgcctgtgttcattcacgtaccttcagaagtcagagggtaacttttaagaattggttctatcccccggcttataactcagatggccaggtttgcctgacagtgcctttttccctggctcctggcactgcgttctttctttaactctgaaatgtatgtaaagagcatatgtcacactaatgtggactctctaggtgttagattgatcagattggaagccaacatatgtggtaaacaacccagagtctaatcttgatgatccaggcattttttttccccgtaacatttgggagatatgtagatattatttcagtgaggactgtcctgtaaggagtattgtttgaaaataggtgaattccaaagcctgaagaaaaaaagatgtcctctcatgtatattctttttaatgtacttttttagttatgtgcacacacacacacatatatatgtatatatatgtgtatatatatatatatagtatatatgtatatattatatatgtatatatatataatagtatatatacactatagtatatatgcatacacatatggtatataatttatatagtatatataaattattagtatatacagtgtattatagtatatatatttatataacatatgtatgtgtgcacgcatgtgtgtgtgtatcatacctgcctactgctatcctgcctcctcagtgcattcctgtcctcctcttctctagctctcctccttcaccgagtctttctgttttgcctttggtgaccaattgactctaataagtagggtttggggcttggttatttgagcaagggtggcttaccagtggctacaccactgaggaatacatcgtgcagctcatttttgtttctggtttccactgtgtaagacgtagctgtgattttttttttaaaagatgaatattcatgtaacaacagcctgaggacagaccatcctcgttgggcacggttgacccagagaaagctgtgtccagcccggcaacttgtacaccaagcgtgacccataggactaattgaaggctgcagaaaataactttatagatgaatttaaactttagacagaattccctttgcagccacaaatagcagggctatttttattgtagcatccacagtcgagatggaactcaatattagaagaaatggtttacttcgccaagacagctcacactcaacacagtccttgtttttcttggcagccacgtctcagccatctgcaagtccaggggagccgtctccgccatccatccatccagcacaatcagagttaatagttgaagctggcgacaccctcagcctgacgtgcattgatcccgactttgtcagatggactttcaagacctatttcaatgaaatggttgagaataaaaaaaatgaatggatccaggaaaaagccgaggccactcgcacgggcacatacacgtgcagcaacagcaatggcctcacgagttctatttacgtgtttgttagaggtaaatgctgggttttccgtggcgctgtggtggagggtagttgcttccctgttctcacccagaggtgaccaaaccacaggcaggatttggctggctggttcaaggaggcctaacatacatggttttcttcaccagcttcctcatggcttggagtgtgacccctgctgggggtctgcaggccggaactggattacagtctggttaacccatttgtcctggtgctcggagtcaaccccgggaataaattaggccctttgggaaaactgtattttaatgccttgaaatactaaatattcccacttaagtaaaaacacttcagggagcccaaggcctcaaaaggcccggacagactagtacttcaaaagacttggcccactcttagggactacattccagaaaacaactcggacagctaagcatttgttgtcagtcataagctccttcggggttggttcttttcagcaattacagcctctcagaaacagaagacaaagatgtggcagttggagcccctacacctcatttcctagacgcattcagcaatctgtggatgtgtgtttgctatcatgtcaagaactctcggggcggtatcctttgggtgatgtaaaaacaaagctaatgtcagtctaagagacaaatgagaaaggcagaagatggcagtcctggttgtagcaccagttggactgggactgggtctgtcattgatcgcatgcttgcagctctgtgagtctaggctggatgctttcctgtgcctgggaggtgctgcccggggcctccgtttctccctgtggtcctcagataagatgagcagtctcacttagggtattgttagggaaacacaattatacaaatcttagcacgctcaaagaggggttaataaagctgcctctgaagatggccgggaaattgactgtgcctctgccggcggcgttatcggttgtccttcctgaagtgggcagctgaggagacatgctcagtgataagccccagcttagcttcagaaatgttgggcccacccgcaagctgccggtgacactggggaagaaatttttgtaatttccaggcggtaatgagagtagccattgggctgcatggtgggctgcgtagacgcctgcttgcaggtggttgaattagccagagcagtcagctcacaccctttcttcacggctagacccttacctagtgtgtgcctctctctgagagggaaagaagtgactcctttgggaggctcctatgccctggtgattgggaaagtatagacagaaaaccaacggcagcttctgatggtttttcttgtcttttttttttttaaattaagtgataaaacaaatatatttcagtggccacagattctgtttgtgtgtgtgtttataacatttgatttccatgtagagaggatgatttgaaagcagaatttcagagggctgagatgatagcttgtcaggcaagtgagtgcttgcctacaggcaggaggacctgcatttgatccttaatatccacatagaatgctggtatgttggaggccagagagcaagctcagcctttaagagaaggtgctgcttttacagaggacccagtttggtccccagtacccacactgggcaggtcagttaggaccacataggactccagttccaggagatctgacgccccttcttccgctctttggtccgcgtgcatctggattagctagcagagtcatatatgtaaagtaaaatatcagactttgaaatccattgtgttattcaagcttgtaatcttttaaatcttttaaacttgttttcagagagcaggttgtggtggtgcacacccatgcctttaatcccagctgaggcgggtggatctctgagttagaagctaacattcaagttccagaccagccagggctacatctcgagaccctgtctaaacaaacaagctcacaaaatgttttcagtgtctccacatccagctttttgttcttctccacagatcctgccaaacttttcctggttggccttcccttgtttggcaaagaagacagcgacgcgctggtccgctgccctctgacagacccacaggtgtccaattattccctcatcgagtgtgatgggaaatctctccccacggacctgacgtttgtcccaaaccccaaggctggcatcaccatcaaaaacgtgaagcgcgcctaccaccggctctgtgtccgctgtgctgctcagcgtgacggtacatggctgcattctgacaaattcaccctcaaagtgcgggcaggtacggcctctttcttccatcctgtgggcgatggagaccctattcatggggctgatttctctccttccacttagcctagggcatcaggacacagctactagtaagatgaccaccttccagataatggtagacatttgtaaattcttccagagagacaggtccaccgctgttgctagctaagatggtcattaaacctcctggtttagggcatcccaaggtgacatccttgccgcaagtgttcctactcaatgcaaagatttaatttgaggacataagtctacaagtgatttatgcttgaatttgggtggacctgtttgtttgtttgttttttcctgtagctgattggttcccaagctactcaggctctgggaaagaaagtgctcacaacccatgaagctggtttccatggcatcacctcgaccattcagtggccaggagataaactaggctttatacttgaggttatctaattcagcatcactttgggattcaactgatgagaacttttaatctgcttttgaaaaaactgtactcattaaaatgaagggaattttaattatttaaaacctagagtttttttttagaagtaagcaaggtgtgattgtataatatctgggaaaggtacccatttggttgaaaggatattatcaactgtagtacgagagatcctcaaaaaatcatcaagggtagagattaagactgctttatcaggctaccctctgccacccgaggggggaggggggggaaagccaggagtgttcatgatctcttcctgggctctcctgtccttttcactcagcatgaatgagtttacttgtggatgaatgacttcataggtctatatttaggtatgcaaacaatacagattggttagtattgtgctttgtattttatttaatgatgtatggcacaagctgtgtgtagtcgagaaaaagcaacgttgggtctggagaagtagctcaggagctaggagtgcttgctgcttgctcttctaacagatcagctcagattccagctcccacctcgggtgacccgtgtcagccaacaactccagccccaggatagtctacaccctctgctttggctttctcagacaccctacatgcgtggcatacacatacaaagatacacactaatagataaagctaaaataaattttaaaaagaaaaaaaaaggtgtgttaaaaataagacaagttgaaattcccactgtgaaggaaggactgacgtcagggccgtattccttttctttgtagccatcaaggctatccctgttgtgtctgtgcctgaaacaagtcacctccttaagaaaggggacacatttacggtggtgtgcaccataaaagatgtgtctacatccgtgaactccatgtggctaaagatgaaccctcaggtgagtgctgtttaagtcctatcacgggctgtggtctctgtgtggctgattgtacaggttgtctccaaaactggcccaagggtggtgaccctgctggcagtcatagctgttagggactggcctagagtacgttcatgtgctgtctcaactacgtacactgcagcatgtgtgttcattatgagtgataaatagctgccacattgttactatcttttgagaaaagaaagggcacctgtctcaggttgttacttaacgctggctttgtttaaatggctttagtaaggaaatttaaaaaaagcaaacagaacaaagtaaatgaatagctgtatactatccagataatgtatacttaaggtctgcttaggccacgtgacagaaagagtcatcaacacctccccacccccttcttcttcttctgaggaaatgccagcatgtatgacccacaaagctcttctgatcccgcagaatggccacatcatctgggatatggggttctctttgtgcggcttggatttccccctttgaggctggttccctgagattaaattgctaatggatttccgtttttttgtttgtttgtttgtttgtttgtttgttttgtggctattaataaaatggctatctttcgtgtggaacatttggacgagtttttgttctcattcagttgacaagtatgtactgagtgcctattatatgtcagatactgtgctgaacatgtcttaaataaagcttagccaaatccttccttccccatctctttttcttccagggctaaggcttgaacccaaaggccttatgcctgcctgcgaggcaaggacactgtctaaccctgattttagacaatttcatttggattttttttttttgtctcaaatactcaacaacaaggttttgaaactcttaattgtccccaatattttccattaaaattcccgctgactgagtttctcttctacccgtagtgagacaatggcgtagctatcagcaggtcctctttcttttacatctaggaatgtgaaatgtaaaataaaggggtacacttatttttcctcctcctcctcttggccagtgttcaacgttggcaatttcatgcctgcatacagagttcggtgcgaaatgcatagccgtggtgatgtgcataatggtggcatttgtacagatcttgatggatgatagataacttgctttgtctacgaagcctgccgctggcctggagatcggattggactggagactcattctttcaaaccaatacctcagagaaacaagttttagtttccagaccatctaatgtaatacaaataatagcttctgtatggattttgggctaaccttacagagcacaatcccatattaattggctttctataatccttgatttcagatgagagaacaatttagactatgtgtgtgtgtgtgtgtgtgtgtgtgtgtatttgagcctgtgtatacttgaaaattagcccttttaagatgagaaattcaatttgccccaggtggttttgttctgaaccctgtttcccaggagcccccacatgccattcccaattaacccactggcaatgggagctaagtctttagtgttaggggctctttggggagatcccaatgtgtgcctccaagggttaaagaaaaaccaaatcatgtgcagacagcatgcaatgtgtgacttgcagatgggactcttggccctctgccagggttcaccgtgaatcttttattgatcctttggcataatttggaatgctgttagcactatcagattatttttaaaaaatccataatgtttgaacttgaccatttagaggaagcttcactcatgagaaatggaggctacaatgagatcttaggagttgttgcgattatttgttcaagcattttattcttggggtttagacagggctcgctcatcttggccagcttttctaatgcttccgaacgaacactgagctttctactggctttcagtgctgagcttggtggtatgctaagttaagatctttgactttgggtgtcagctagcacatcatttttgaccaagctattttgttcttcactaatcatctcagaccttgtgctcagcacccttttgggggactctctgatcctaggaagagtggcgttccatctgttcttggtcactgtggctttggcactgaaggcagaaacagcagcctaaaggccagcgggagcatggcgctcatttttggcttatcatataatagagcgatcctataccctgatatggcagatttctaccactggaaacacctagagggatggctcaagatctgctgaggaccatgtgagaatggcagggagagccctatttgttattcacacctttaggaacaaaggccaggtccaggtgtctttgacttgattaagtccttgcagccaaacagattctcttctttttaataaaccttgggtccaaaatttttatgtatgcttattttaatgtaacaggattccaagtactgtgacccggacatgatgttagctccattacagagcctttgctttgcctgtgtgaggccttcagttccagccctgaagaaaaattcttaacctataattatacgagaaaaaaaaaaaggcattgtctatgtttgtagctagcaatgctgtatatataatagaaatataatgtgagctgcacaggccatttaaaattttctgataggcacattccaaaaataagtgattttttaaaaagtcatatttggcccagtaatatgaactatcatcattttctgctaaaattaacataagagttattaataatgtattctgcctcttataattcaggatctaggatatattttatgtggagtcacaactacagtgtttgaagtactccatggtcgcaagtggctagtccttattagtgacaggtggcctgcacgttttccaggtttctcttgtcttttccccatatacgtcatgcattaccacgtggttgtagctttaagattgatgctttacctgttataggttcttactattgtagcccaagctggccttggacctgtagccatctttctgtctcagctcccaggtgctggcattatatgtgagctgtcttcagtgtttctcttacttcctacccaggcataatctttaatgtcacatttacccaacaggtatttgtgtcgctccaagcgtcactgcagtcggtgtcacggaacttttgtcctctgttatcatgagccttagacacgggtgatccgaggaccccggcatcctgccaagctcctattaccagcactggctgccgggcctacaccgccagggcagtatagccatagctggccatcgcccttggtctttatcggtatcagctcctgctcgcttgctttaattgatgatgttgttttctctattgtaatgggaatgtgtgcagaggccagcggatttggaagatgcagatttcagagttaagacttctttaaatcttttcagtggagttgccaatattaagggtttcccatggtaattcctgtgcaagcatctctccatgtctgatctgcagacagatcacaagagtggtgccctaaggccagaaccacagtcctttctggtcagcctgctggaacactttgcgatggggtcttagagacatcctttgccttatcccttgagtcattcagaaaattctgctgggttaatgactatggtgatgaatgtcaagtcagttgtacatattctggttctaatttcatgttttttaagatactaaatgctaatgaaaaggttgtatgttttctttcagttgttagattcacacatggaaaagggtaaaggggggtagcggggctggggatgtctcttggttgattgagtgcttgcctggcatgcatgaaaccctgggttcaactcagagcacaacataaaccaggctcgatcctccgtgccctcaggtggagggaggcaggtgggagttcaaggtcattcttgcctacatagggaattagaagcaatcctggtctacatggtctacatccgttctcaaagggcaaaaggaaacaaaatgggaatgttaatatgacatatgtatgctgactcattatgacatatccatattctataatatttcttgtgtggtgactccgaaaatctaatgctgcggagaacttggaatgaattttcccgtattttccaatcgttcataatgactatctttcaatataatcctgtgatatgaagggtcccagtgacaggcttgtcatgacgctttattatcccccctcagtagtgtataatgaatgctaatatggagaagttaattgctgctatttttaatttaggaaagatcctgaatataaattatatggtaatctttgatttttttttcttcttccccttctgaaagcctcagcacatagcccaggtaaagcacaatagctggcaccggggtgacttcaattatgaacgccaggagacgctgactatcagctcggcaagagttgacgattctggagtgttcatgtgttatgccaataatacttttggatcagcaaatgtcacaacaaccttgaaagtagtaggtaaatatctctatgggaatgtataaattacgggcaatagtgagaggagaaattactagatagtttcctttttatgcaaatgggattctaagaaccaattcttagaatttattatcactgaatgaatgaatgaatgaatattatccccagagcttcttggcagcagaacacaaaaccagatcttaccagtttacccaaaagacaggagagaactgtcactgaagttcagacctgtccttctgcaagcagaacatatactgactttcccttacgtcttggcccttgctacagtggttcgagttttgcaacggtttgagttttgcaatgaccagagatgttctttacaaggcctcagagatgtgtagagcatagagcctggggtacttctctgtcttctggaacgtgctgtgtgtcagttgttggctctagtccctttgtggtcagtgttgagttgggcttctccagcccgtttgctcttctctggctctgttctgtagctctcaagttcaccgatggctctcacggtcgggaaagctgtgctggtcctggagagcctcagagaagggtcttcgggtctcctctgccttgggttcatcacgtctgctctgtacagtaataggtgtggctttggtcttctggatgcaagaaagtccacaagtatttatatttgaggcaactacttaaaaagagaagccgagcgtagagtgttcctgttatttttgatttatccaaatcaataatagttttcccccaaaatatttcattcatagggtttgtttttgtttgttttgatttttatcttctgtatgttgtttgtttatacctaatttttttttttttttgctttctgtctttattgtaatcaatatgaaagcctttttaatgaaaccattttcttgacgcttgcctttgataacacccatgtaaggggggggggtgaagctcatctctgtaagcggtaataaagcaaaacactgcttgcttgcgtccaatccctcaccccgccctgatttcagtaatttatggaacagagctctgtgatttttttttttctcctgtagtaacctcataaaaatctggtgcttctgcccaagttctaatggaaagtctctcaacagatgaacacagagaagacacttgcttgtaattacagagtcatcacacacaaagtgtgctcctctgtccccaactgtgatcgtgagccatttattaatttgaatagaaggctatgcttttaaaatattaaactccataagcactaatttgctaagttgattagggagcatgttgatataccctcttcagctccagaaagcaattaggaaggatgttttgagcatattgttgtatgtaatcggatttaaaaaaaatccattcatcagtttccaagaattagaaatgtgtgactggaaagctctgtggctatgaaatccgaatctggttttgtcgtgggtcaggactgggttgtggtgggacaggagcaggaagagacaaaaaggctgattccgtagggactaggattggagttcagatccaacatggcatgggtgagagaatgagactttctgaccatctgaatatatatgcacatacatacatatatacatacacacaaacacacagtgtacggtgaaggcattcaacgtattacgggaatacatataggctataaaaatgttactatagtgacacaaataagcatatccaccatctcccacagttatgttttggttttgtgtgtgtgtgtgtgtgtgtgtgtgtgtgtgtgtgtgtgtaagagcagacagaatctgacctgggtttaggttaggggcttttctgcttctctttctaatgtactccagttcttctctgtatttcttcagaggaaactgcctccagctcccaccacgttacagatgaaatgagacagattttatgggagtgtcaggcaacagcgtttaaacctgattaaaagttaatgtgccactagtgcagaagctcttgaaaaagaactttgttataatagttttgttagcattgcttttttttttatgttatggtatctaaggtagagtcttaatcctttttgcattgtagaagtctaaggctcagttccactatgtagcctacccctcctgtgttgccagccttctgttttatgacaaatacctgacatacttaaggtttaaagaagcgaagggtcactttggctcatgttctaagtctgtggacttgagacagctctggaacatcatggtaggaatggggggggtgcagaagagagatggtcacctatggcagccaagaaacagagcagccagaaatagccagacgcaagataggcattcccctagtgatccatgtccatcaaatagcaccccaacaatgtacatccattgatgaacttaggacctttatgatcaagtcccttcctacaagtccattcactagcaaccaagtctttaacacaggggattcttcatagtcaaatcagaacacctatattggcaaggaaaggttacagaaaacccaggactgctgaaaaaaatatatatatacatacatacacacacacatatatgtgtgtatatgtgtgtgtatgtatatatgtatgtatttattttaaattaattaattaatttattgtatgtgagtacattggcaatgtcttcagaaacaccagaagaggccattggatcttcattacagacagctgtgagccatcatgtggttgctggaattgctaggtatcaggaaatgctaggtatcaggacctatggaagggcagtcagtgctcttacctgctgagccatctctccagccctgatacacatatatacatatatatgtatatatgtatacatgtatatatattttaaatatacatagtttatttttatgtcatgctcattgatgctttgcctgcatgtatatctatatgagaagatcagaaaccctggaattggatttgcagacaggtgtgagctgccatgtgggtgctgggaattgaacctgtgtcctctggaagagcagaggatttattcactgagcatctctctagccgtgcttacacattttatctatggtaacctgacttcttttgtgtttgtgcagttatctgaatatatgaccttgtgaagcaatactgattcttttaacatagcaggatctaacaaacaaataaagcccttgttgtaaagaacggcatcatcatctgggagccccaactccagtttttagtttggatgattttttttcattccccactgaaaataataatcctttcagattggttcagtagagagaggaaggacacaggattgtggttttgaccttgaacctttaggcaaccaaacagcattaaaaaaaatacccaaaacaaacaaacaaaaaccctacaatgataaccttctatgtatacatagataactacaaagttagtaaaaatttgcaatacagtttaagcacttgaaagtgaaatggaacaaactctaacttggtgtggctgcttcttaaagagttgagtattttgcttatatttttacatatgagttttcattatacaattttattcatattcttattctcccccttaaaatgtatagagactctaaaaaaagcagccactcttggcttctcttagacccatgtttaaagctagactttgcctataatagctctggatctaaacataaatcatcaatttcatctataaattagagattacaagtattgcctataaattggagtaaccactaaatctctaacctggggctgggaggtggcttagtgggcaggaatgcttgttctacccacgaggagctgagttcaaatccgccgcacttatctaagagactgagcatggttgcctgtgactaattccaagactaggggacagagattgcagatcctgagagctccctggtcagccatccttcctgaaatggtgaatttctgattcagtggaagacccctggagttctgtcctagttccagggatagctctggctgtcctggaactcctcctgtagacaaggctggcctcaaactcagagatctgtctctggagtgctgggattaaaggtgtgtaccaccaccacccagctagtctccgtactctaattgtgcatgtactatagacattgacaacacgcacacacacacacacacacacacacacacacacacacacacacacacttgcagaaaacccataacctgcttttcatctataaattagaagctacagctctctgttccagaatgattgtaagcataaatgtcataattattaaatgaaatgtgtgctaacgtgcctgaggcagttcttggcacatagtaagcaccatcccctaaatggtagctataaaaataagatcggcaattaccttattgctctttttcaagctcgctcttggattattacataaccacgtccaaggctgtactatttacttcaccaatgttctgtcatgtcaagagttatcgaaacccgtgcaaatagtactttgtgcatctcttaacccattttaagaagagttctcaaatggaaattataggatttagacttaaaatagataatttaaaaaaagaaactctcgattgctaactggttctgagacgtagcatgccagtttgtcacgtgtggttccctgcgcttcttcgaaacacactcgagatccttgggtttattttaaattagttttgctatttttgataaatggagagtgccatccatattttaatgactggtttagctaaacagtccttctcccctagtttaatgtcctctttcccagtaccttaattcaaattcgccctttgcgatattttccttttctcacctcccaaaagcacccacccctctccccactaagcggtaaaagcccagttttcacattaaagcattgtctgacggatgacccacgatgcgctaacagacgacactcagtacggatgggcgggctagccattttcttcaatacaaaatgatattctatcactttttggagcttgttcttgccttgactcggtggtatccttttactacatctgtaattcttctgggcctaggcgggggctatttaataaagtatcctgaacatgaacctcacaattgtggaggcgagcgggtgtagagacacttacagggaaccgctagcaaggccgccgtatacatccggggctcagtgtgtgccctgcctcaccccggagatggcaaagagcaaaggcggctgacgcacatcttctcacgggtgccagtcaacactggaagccgtcatttgccaccatttctgtgactcttaagttgaccttgcatgctcttgtcagttgtggatactgactgctgtcttaactctgttccgattagaaaaaggattcatcaacatctcccctgtgaagaacactacagtatttgtaaccgatggagaaaacgtagatttggttgttgaatacgaggcctaccccaaacccgagcaccagcagtggatatatatgaacaggacctcggctaacaaagggaaggattatgtcaaatctgataacaaaagcaacatcaggtaagaaggggacctgtgcccggctctccccgcaaccttcccgggccatggtttggtgacccagcaatgagtgggaagatgccacattgaggaaggacatctggggcttcctctgtgtcctcggccaacaattccgttttgttgtgagtttagaatgttcccaccacatgtttggacgtgtgccgactccgcgtctcatttgggatgtggtgggttacttttctcttagttttaagggtaacccaaagcaatgactagcatatcttcaggacacaatagttctccttagaaagaaaggggagttagtattgttactactttaattaaatctctggggcaactatgcatcaccatgcttccggccgggtgattgattgtggttttttttttctttagatctcttattaaatcttcaaaacatcgtaattacaataatagcagtcatgataccttgtgtgctttcgtctgtttctgtcatctgtaccttacacacagctgcacacaccttagatgtagcatttgatttatttatttttttaaacttaacttatagttgtgtagatatgtaatggtgcagggacacagcgcacccctaagtgttcgtgaaggtcggaagacaacccttgggagtgaggtctctccttccacgcttacctgcagactcaggagctgtgctgaaggcacctttatcatctcactgacgccgtggcactctttgtgcccctatctttgtggaagaggaacccaaggcccaggcttggtgatgtgaccaagatcaaatgactcataaggggctggaaactgggcagagtctgttagtccattcaggagcttctgctgaccattggatgaacatgagagagagctgaggcgcccttagcttggggttttgcatgcatttgtctaaaaaggctcaggtccctagaagcctatcctgagacaggaggtcaggggttggggttgctaaaggaaagctatgaggagtcaggaaaccagctgagaaaggaccttggggaattctccattgagctttcctgtacctggccactcgggatcacccttggctgaaggtgatagaggtgaagcatccccaacaagggtctgtggggacatgggcataggccgtagaagacacgcaggacggaggagcttgcccgagaagctgagactagaacattcgatctgtctaccgatggggagaggagagtgagcaaggccacttgagtgtgggcagtcgggcatggcctgctcaggagatctatcatctagagctcacactagcttaaggattgcatagtgtccctccatcagccgtcctgtaggtccctgagtagaacagatacttgcataacaaatacacctggggactctgggacaagaagccagggagtaagaagaaaactaagagaacttgacaggaagaagcaaggcaggggacagtggatgaaggagttggtgtggatcccaaggtctaagtgtcagcgtgaaagtcgagggtgtgtgcaggctactgagctatgggttcccagaacagaggtcaaggcgctgctacaggtaggcagaggaggaagtggtcacgaaggtagcctgggactgtggcttggcttgcttatttctgtgtcttcctaggtaggcctttgttccccaaatagagtgctctgtgtgtggtgtgtgtgtgtggagtgtgtatggtgtatatgtgtatgtatgtgtgtgtggatatgaatgtgcatgaagtgtgggtgtgttgagtgtgtgtggagtatgtgtatgagtgtgtgtgtagagtgtgtatgagagtgtggagtgtgtgtgtgtgtgtaacactgaattaagtgattcatcgatatttctccctaaataggtatctctttccaagtagaaactgacagagacgtgcactccaggacagactctctacagggagttgatttattgtccttcctttgtagatatgtgaaccaacttcgcctgaccagattaaaaggcacagaaggaggcacttatacctttctggtgtccaactctgatgccagtgcttccgtgacattcaacgtttacgtgaacagtaagtaaatcgccgggctccttatctttttattttgtgttattgcacgctgcagcccgtgggtctaacagctgcagagctgcgttgcttgtgtactatgtaaataatgtttcatgataattttgaccttaacaaagacctcgtggtttggtggttggaagagaaaccaattccctgccctacatttcactggccacatgaccttgttgaagtgctgtggatttctgagggccgccttggaagtcaacagaggagccagagaggcccagcttagcgattgtttaagagaaagtgtattattattgattgttcaactggagagccagatgttgaatggtgctggcatttgccattggggagggggaggagagagagagagagagagagagagagagagagagagagagagagagagagagagagagagagagagagactgttaagccctgacaagaattttctcttacttgagctttctctcttcagcctgtgatataccatttgtgtttaagattgttctcccactatgatggatgtgctattgacccagctcaatggatcacccctgagtattttagcaggacctggggagcaggcagcaggtggtttggtggagttgtctgtagtcatgggaacctcaaaacctcaataccaaagccttgcattgctatggttcttagcagcaaggcaagggtggggggtgaggatgggggaaagctatgcaagcaggagtcaatccttgctgcggcttctgccaagtacagggcttctccttggctctgttctgggtgcagccacactggcaaggagtggaggacaccattctatctcctagagtactcgggaagatggtccgataagtaaatgctagaattatccatcttgcgtgcgggtctggggaaagggaacgttcccgtgatagttgttgctgtgagagagtgcacaagcagcttgaggggggcggggttcggttcttgcttgcagggaatataggccatcttaacagcgagggcatggctttggggtttggtctgggcagtgggagcatacaaaactcgttcacctcatgactaatcaggaagtggagaactgaagctggaagccaggctacaacccacagtggcctggcctgccttgctaacctcttctgctagccacgcctcctgccctgaaggttccatgctccggatacttcagatcaaaccagaatggacgccctacaaaacgagcttaggaactggacagtacacgggactctaagcgggttgtagatggctggagtgggcggaggcagggggagtgtcttccctccctagagcagcatatctgcagtggtttcaggtatatctctcccatgagtccctgtcttgctgtgatagccgtttgggtgcggtcagatccatttgttaggtgaaaaagactcagctagtaaagccctactctggttggcttttttattgcagtctagggttgcttggccgtatcagtatttctagaaatgtgcttcctgattaagatatatcagtcagggttctctgaaggaacagacctgctaaagcgcacgtgcatgttcgtgtgcacacaggtacacacacagaggcacacacacacacacacacacacacacacacacacacatagagaattattagattggcttacagaatgtcatcagtgtagcccagcaatagctgtctcattcggtccaccaggctgaatgtctcaggagtcccaatctgatgctagaagggttcctagagagccctggtcttgggtccgcattggaatcctgaagaaggcccagactgagggagggctttcctgctacaaataatccgatcaagaaaatccttcagaggagtgcccactgcttgggttctagttgattccagaagcagtcaggttgacaaccaagactagctacccaggacatcagtatgcgtttgagctgcgtgtcagggtacatgcctttgatcccagcattctggaaggtggagagaagtggatctctgtgagttcaaagccagcttggtctagtcagtgtcaagggagagaagtgtcacaggcccataattaagtactttagtgttgctaactctcccagagtcctttatctattgatgtatatcctatacttccttaaaagggtgtgtgtgtgtgtgtgtgtgtgtgtgtgtgtgtgtagtggtggtggtgccaatgatctcaggctctggaccacagagctcctcccttccaaaggaaatgttaattaatatttctgtccctgagaacagttttgattatttggtatctcattggccctcaattcaaatatttctagattaattcagatgttaatcaagggagcttaatatattacacatgggcaaaattacctacttctgaaaaccgtaataattcaactaatttaagagacgaccgtaggcaaatcaggatctttgcaagcataatgtgcaaaattgttcatgcaaaacttgattctgagtgtagtaggcccctcttacctaccttcgccaacaccctaatccatggtagaccagtactcccagaaaatacagtacgagccagttactacaaaggtaaaataaacaaacaggtggacactgtgtcaggttttgttgggcactcagattgctccatctgagtgccaccagtagcaagtgggtccatgggacccctgagaagctcgtcatgttactgttagcctggcctccgggccctcctttcccagggtgttgtctgccacttgggcatgagacactgatacttccaacttttctttctgggggcagaattgctgtcatttgaattttgaggttgtcttgtcacccagcagggtcagttctgatcaagtctgctagggacactgctaccttccaaagtgatccccacccccgccaggaggggcctcttctatagtcgagagttttgtgctctgacaagcacctagccattgatgggatgccttgttcgtcattctgggagggaggaggatggggcaatgggctctgccctccgagattaagcttttcagggaggcttttcatttctgtcagtttcttgcaaatgctaagttgacaaaagctgttcgtttcactcacagggcacattggatttacaaatggctttgacagtgagcatatttgttcaaactgtccgcctcttgtgaggcatgtcccagtctctgtactgttatagtccacagtattatgggtttatgtttctttcttttaatttatttattttgcattggacttaaagtcaaaggctggggatgtggctcagttggtaaaacgctggcctgtcaaagctccagcattgcacaaaggcaagcctaagcatggcggcctgtgcttagatccccaggcaggaaggtcagaagttcaaggtcattctaggccacgtggtgaggccggcctgctatgtttggccttgtttgaacctgtcgctaacaagccaccaaacaaaagtgttttaaaatcagaaccttgggactcatcgtgtccgtgttgccatcacggggtaacagtgacagttatgggtaattctatgcatggtttattctgtaaataagcttagcctccagggggaagggaattatgtattgcaaaaattagaattaataaaagtcaaggtaataaatgcaccgggttacacagaaattcaggctccttagtgacatgatgcataattgcttcccagattcagtgctaaagaaatgctaatgcacggcccttgatgtggagtggtctaaaggcgtcaagagtccatgtgttttgaaaatatctcgagtagatttcaatgtagtcagtgtgggggtagggggctaattcctcctgtaggagacttgaggatttcattaaaataaaaacaaagcctcgatttttttccccctccattgaatttgcattactgtaattcctcctgggagtgcttatccaaggtgtacatagaagttgaattcttagctctgaaaagtcggtgccctttgggaaaacagtgatgcatgtgaaaactgctgaaagcgtgtaattgtaaaactccaaactttgccccaaccatgcttcctccatgaggcatgtctctcccagattcctctcgatattgggggcaaaaatcccatctgccagccgtgtgacagcccgtagtgcttattgcgcccctctggtggtgcttgctatagtacccaggtcagacagttccgtgtcagccagatctaaaatcaaaggccatgtgcttcctcacttggcttttgggcttttcctctcatcccagtctgtttttttttttttttttttttttttttttttttttttttttttggttaaaggacagactttctaaagggcaaccaataaagtaaatctctttataaatctattgtgacttcttaatctcaaatatccatgtgacttgtggagttatttatataatcactggaggacatgatgcttgctctctaacactagtcatctttagacctctgaattgtcttaaatctttggacagcatctgatagcatttgcaaatcagctttaggaatttaaatatgtggtatagaagggtcatcaatagctcttcctccatccctaaagggactacttcagtgacagacctcagccactgaggagggctgctgaggtgcacggggatggggacaggaagggctcgccttcctcatggtgcttgcatagaactgacttgtcttcacttagacttgggcgcccactgatggcttggtccaccccgcattgactgtcagtatcaccagcttctctctatttatggaaggttgctaacagggcaccagaaacaacttaaggaaatgcccaataatggattatttctaaatcattgcatcaaataattaaatcctgctgtggtagtcactcgattatttatagaccctgcagtacaccaaaaatcagcccaagtaataaatcacccggaatgaaggttcttgatgagaaagttcccctttgaccgcatttgcaaagtccaggctgcttttgatgtattttgggggtcactgatagctaaatctggttacagatggctaatgcccggctaaggggaagtcactatatgccgggcagcctgcatgtgaatcacatggccagtccacttgccaacactgaaggtggacctgtcaagccagccgtgtagacagcttcagaccccctgccagccatctgggttgtccacctggctggaatcgcagggtcctttcccagtgtgaacgtgtaagaatggcttcctgccttcaagggctgctcggtttggggtctcggagggagtatgcccttgaagagccttattgagcaatgagagctctttgcagaaggagatattctccaaccacctagcttcttggtttctgcttctgtcgtcttcccttctcctcactgattgattactgatgggattgaactctcaggcctctgaatacctcctgcctctgagctgtgttctcagcatccatgtttattaaggattgggggtggggggagggttaagattttcctaacaagtgtgtgtccaaactgtcatgtttgaaaaaccccagtgcgtttctctgtggggttttgtttgaaaaggtttttgcctctctagtgctgctttgaggcttggtccaggagggcgtcgtttagattctgaaataatagagagttgggcttcgtggagccctgactattgacttgcttttcggacgcggtggggcttccacggatgctggaatgtagtctgtccttgtaacttggccatcctgttccatgaggatcttcaagggcagattcacgccaagcctcctgaagccgagttgtccctgaaggcaggcagccattcttctcacactggtcaaggaccctgagatgccagccaggtgggcgatccagatggctgggtgatcaggcctagatggtctgaagtagtctacatggccatcttgacaggttcaccttcactgttggcaaacgggccatacacaggctgccttgcaatgtagttggccgtatgtatgtatttctaaattcaaccctttcatacttcagaagttaggtttggtaaacccagaaaatgtcgaagcaaaaacgaaaagcaaaatttatgtttactgtccgaaagtttttttttcttttgacatttcattgcttcccattgctaatacccctcattttgtatctttccggcccactctcacaggcgcatgtgcatgtgcaggtgcacgtgcatgtgtgcgcggacacgcatgtttctaagaggccacgtttctctggggccatcagccggatgctcttatagagcacccaggcttggtttcctgcactcaaagggtggttcacaaccatccattgctcgaaatccaggggatcttatgcccacttctgacctgcacagagacacacttggtacacacacatacatgcaggccaaatggtcatatacatgaaatagagtagatacatattaacaaaagtgaggttgtattattttatatcccgactcgttagtgctgagtgcagatgtactgggaactcctttccagtcagcctccctttgctatctctttgagcagatctttcataatccctttaagcccacgccgcatacaattttgagacattaaggagcgagacggttctaacatgatgtgacagagttttaaaagaaacctgtcaggagtttatgatcatctatttaatcttgaatgtgtgaccttgcctaagtgcctggaagttacaaagtcgccatctgtcactgtatctggtgctctgtgtcttccgcacacagtcattcctcaggaccgttctgcattaagcatagctctcaggttgtctgagtatagtagatcatctgtgtgaagacagttgctggcctctggcattaatctgtttgtagactttgtacttatatctgagatcgggtaggacttgagtcttatcaatctcttagattgagtattgttttttttgtgtgtgacacttttttcaacagttgttttatgttgtgtgtgtgtgtgtgtgtatacactcacatgtccatacacaccatagtgtgactacaaagtcagtcacgagttcatccacgccgcagttgtgaatggaaaggttgtaggacaatttaaggaagtgagctctctccttctaccgtgtgggtcctaggatcgaattcaggttggcaggcgtaggggcagtgcctccccccatggagccatctctctggacccttgatgtgtgcagcattacatctctatcgaaatagaatctctagatactagaatggttatagacattgaaataggaggggacagatacagaaaccagctgttagcatagaacccaagtctctttcactctgaggggaaaaaaagacagcagtaaacacctgtaaacatctttctctgctccagtgttgtcaccattactgtcctttatgtctcataagatgataattcatcctgtgtggcatgccattaatttagtgtatctatttgaatgccagacatcttagagaattcagtcacctgcctcggtccttgggccctttgttgcctatgttgcttgtatggttagacattattattattattattattatttattattattattatttctaattaaatggtagaaaagcaaaggaatgggttcagtgtgcaactgtaaatgttgatgaagttgccccccgacttttccagacaacagcacgaggagccattttatatcgtggaccttctgctgtgtggaaatttcctttgtatttgagccaggtgtgtttgtacatcaaattagccccattcatttataaatgtatgcagggtcgcctctaattcagcaggaatttaaattaatccaagaataggtacataattttttttctgtgggcattatgtcaatatcctctgaattacgtggcaaaatgaatgacctactttacagagtagaaaaataacatttcaacctgtgcctgtgcaccttggcagcccacttagctgcttcgtgatgggcgttcgggtcccctgctcacatctgggacgcacacagcactgaggatcttataaatggagtttaacgagtctgagtagagaaggctttctccaagtagagacattattttgggattctatcctgaaactaggaggttggttggttggttgttgttagatagtgtatgttgtagcatgcgtgtgtgtttgtatgttcccatgtgtatgtacatggacatgctgctgtgcaagtgtgtatagaggccagaggttgatattttatgtctttatgtattaaagcagtagttctcaacctgagggtcgcaacccctttcggaggagttatcatatcagataccctgcatatcagatatttatgttacaattcacaatggtagcagggagtagcaatgaaattaattttttgatgggggaggggtcaccacaacatgaagaacggtattaaaggctcacagcattaggaaggttgagagccactgtgtcaaagcaaggtctcttacttgaaccttgagcttgctgattcagcaagcctgggcagccagttgggtcttagcttccaagcactgagattagaggtgggccaccatccccccaccttgtgtttgtatagtaggtgttggggatcccaactctggtcacatgttccttactcctggatggcaagcattcccactgagctgtctcctcagctcagaggagctaggggctctttctcatggtgttttagaacagggatttggaaaactatataggtggttgctgggtttgaacagtcaacaaattaagaaaaaccatttttttaaagtaggtataaaggtcagagattgggactgaagagatgacacagcggttaagagcactggctgctcttctagaggccctgagttcaattcccagcaaccacatggtggctcacaaccatctatctgtaatgggatccgatgccttcttctagtattcatgaagacagggcactcatggatataagataaataaataagtcttttaaaaaattaaaggtcagagatttttgagacacaatattaaactcataatccagttgggcatatcactgcgttaaagtaacgtttttattgttaaaatgggtttggtgtttagcatatatagttgaagtttttaatttttttcatttattggacaaatttctgttttaagatgcgtattttaggtctgatggtgtgtgtagatcagtttgtagagtttacttaacaggcaaggaggtgccttgggtttcatccccgagagcagtgtgcttggtaggggacatttcagcactctgattttggaggcaggaggattcgaagttcaaggtcattcttggctatttgtggagtctgaagtcagcccaggctacgtgagactctggcagaaatacccatttgtcatttttagataactgtaagttgggatacaatgcaatatatttcctcactgtctatagcggggatttttgtgacacatgcctataatatatcttttagcagtttttttttttttttttaaagtcagctacagttagtttatagtcttgtctgagctggtttatattccctctcattataacaatattgtggcagaaatgtagcttccatccagactcaacccaggatggcgacgaattgtgagtgcccactgtgtcccagcaaacccaagagttatgaaaaccagaaagtcatccttccaaccactctccatttggtcttttattatttggagccccgagtctacgttccctctcccgctgctgatagagtgcaggcaaattgttttcagcatgggacctggttagggtgggcagggccagagaaaaccccgactcagagccactggcctgcaggacatgaatggaagggtgagtccccccgcttctgtggcccagagccacccagggtttgctgccagctcttgttctgtgtaccgagatcttaaaattcattttgttctcgctttccacatggacctgatggtggagagaagggtggttttcaaaacctccaatctgccgggtaaatcggtgtttcggattttaattacatgagcagtaacattctcacagttattgcctacaagccaatcagtgatattggaggacactggggtggcttaaatctatggtggtttttcaaatggcaagggctattttaagaaaaaaacaaacaaacctgcccaggaaacatgaaacttagacatttcttaggcttatcaaaaaccccaacgtgggaggagttagggaatatgtcgatagatatcctacttacttcaggacgtctaagaaaccacggctctgactcaacctggagaactgcggttgtgtatctcttgcggtgaaatgcatatttaatgccttacaccgtgcattgagccacttataaaatgcagataagctttgggtttcattttggggatcagttctacctagctcattctttatgcattaaacagtttcctagtgcagcctgacacagacagccaacgctgggccagagtgacttagccttctcagagtgaggtatcacaccaccagtgtcgaggacagggctgggactaagatgaagtaagagaacagatctgtaggcgggaggcatgccctcgtaggtagccacatgtcccttaagggttggtgatcctgaactatcacccctgggctgcttctctgtcatacttctagtcctggtttttattgggtttctttaaggtgctttgttttaaaaaccaccaccactaccaccaccaacaacaacagaaccagcaaaacccaagctctggctggctccgatctttagcttttagaagctggaggttggggcaggaaccttcatttagcttccctcatagctaaggtttaggaccgtctgaggctcaacaggacagaagccattcagctagcctcaggttatatcctacctgggatagcagctttaaaaaaaaaacaaaacccacctaattagccaacacacaggaacaagtaggccagccagaccacatctctggtttcagctgaccgttatgtaaccgctcccaggtgtcgcgctcgaaggcttggatcttagagagcccttgtcacgaaagcaaagtataactgatggcccaagtttgagctgttccaatttttttaattagaaatgttttatatgttcatttttggttccacgtttactgtatgatagggaaaaacggttagaagaataaaatagatgccatctctaagcctgttaggcagaagtcagcattattaatgccccacaaggcagcaactctctgatgctgcaaccctttggtacagttcctcatgttacagtgacgaccccctccccccagctatgagattattttgatgttactttataactttaatgaatcataatgcaaatacctgatacgtaggatatcatatatgtaactcccaaagaggtcatggcccacaggctgagaaccactgccataaggtatcctttgaacatttaggaattacttttctatcgtattaacccaagaaaagcccatcttaggacatgatggacctacacaaggctgaatgccaagaatataagcagatacagctaatgaccttgccatctctgctgcctctatgtagactcccctgttcaatttttgttttgtttttgtttgtttgagacagggtttctctgtgtagccctggctgtcctagaactcattctgtagaccaggctggccttgaactcacagagctctgcctgcctctacttcctgagtgctgggattaaaggcatgcgccaccaccgcctggcccctaatcatcgttactgtcagtatacacaaactccccatgtctaggcgtacgtgtagatttcctctctcttgtttctctgttgcaagaataaagcaactaggcctcccgcccaggaaagccacctttagacttttcttatcgttacttcccagtgacatcgagcacttgttcccttggtggtcctgtattcattcaccagctcttgctacatgtctgctgccgccaaaccatcagtctaacatgctgctcctgtcattgaaagtccgaaggaggaggcagaaaagcaagagttatgtaacaaaatcaagtgttcccgaaggctccagggatagagagagaccaaccaacttggctttggagaagtggggttgcttagaaaaggaggtgactctggggctgagtccagagaggcccagcgtatggctcccacagtccccggcacaatagcatgctcctacgagtccactgttcttttgtgtcctacttttcagcctgatgccacagttgcccatgataattaaatgaaacttgccagatggatgctttctcgagacgatggctcgtcttcttgctctatttgtgaaagctggcgtaagatccaagtcctcaaggatactcctaccttgagatagctttggagagcagtggctcttttgtgtgtgtctgccacacggcctgccatcagcaggaccaggttgagtggcaggtgggtgtgtcacgcatgcggacaccgatccctgccaactcatcgtgcctcggagggagggggtgagatgctgagtggctcttctgctgagatgctgttgatcatcgttaccttcctctggggaaatgggttccgtaagcttctgatctgtcagcctttctgtctcacatctattgctcttattagtccgtgtataatagatgttgaagtcccagcactccaggctaacacacacacacacacacacacacacacacacacacacagtcacactgtcctaaagaagcaattttcagagcattaaagggagactgaaaggtgataaatgttaccaacatgtgcagctaactcccttaactggtattctaataggaaataaccaaaccagttgtagtagtagtagtagtagtagtagtagtagtagtaataataataataattattattattattaatagtaattattattattataatgggtgtatcatctgtgagtcattcttcattctttttgaaaactttgtattgcatttatttatttgtgtgtctggggagcagtgtgtaccacaacatgtacatagggcggggttagaggacaactagtgggggtcagttctctctcctcccaccctgtgggtttcaggaatcaaactttgacagtcaggttggtggcaattgtctttaccagccggggcatctcaacagcctctcctcctttagttctttgcatgttccatcacctttccttaaccaacatcctatgagatggaagccatgttccctctccatagatgaagatcgtcatcagttggattgcccactacacacctgccttgctggttcttacagcccaggcttttgtgcagtgatgtgcttggccttgcttcccatctctgcccgcacgatgccggccgactggactgctaagcacactcatccacagaggaccagaagccttccaggattagtctgcccctagatccatgccctagaagttcaccttgctttcactttagaaataatttccagaatttgaaattgtcgaatatcaattgattattgtagttacatagggctgtcaaattagagtcttcctgctggcacaatttatgtttgtgctgattatacccaggctgtagataaatgcataaatgaaactccggggctggtttcttcctccttctctgtcatcctctcacactgccattcacggttgtggtctaagctttcctgtaagtacagcaatccagctcttaccagcaccacctcttgtatcccctgagagtatagcttctatttttctacaacaacttctaatttcatctatttcagtccctatagtaacatgaagtgtctgagcaggtaggctgacttgaaggcctattggcaagaagtccaagttaagacagctgattttgacctgaagcagaagctagccaggctggtcttgcaggctctggtctacagagttccttgggatcctgataccttcaggccgatggggagggtctgggcagcgctggacaacatacccactgcacccttatgccacctctgggtgtctccttagctttctcagttgcctccagaaggttctagggatgagatgagaaagagaatggacaaaaatcacgccgtggttgttcagccaactgatgaggctatttctcttcctgcagcaaaaccagaaatcctgacgtacgacaggctcataaatggcatgctccagtgtgtggcagagggattcccggagcccacaatagattggtatttttgtacaggagcagagcaaaggtgagaggtttatttttggcactgcttaaaatgcagaagggaagggctataattcacttgaatttcaaatgtgttttcggacttgcgatttatttttttttagaataaaaggctgtcttctgattactcttttcccccctcctatatctgtgtggcttcttaagaagggataatggctatattttttctggtcgacattaattttgtttgctgaaaaatgattgctgagtgacttctctatttgggtggttatctttttgggtttatcgtgcaatttctagcctgcaggtagataaagcaatttcccaggacagagtaattagatttccattctatacacaggaggtaatgtgtgtgggaaatgtggctgcagttaccatgaaaaaaattacctcagaagttaattgccaagtagccaaaaaagtaatgatcgcacaattacacatacatacagcgtttgtgagcagtgggtttgcaaaagtgtctctccttggtgaggtgcccagcccccaaacaaggagcatctgcctctgcgtggctcagagtccctcagaggccacacttaagccttaaattgtcctctcgaattacctgaagatgaaaatggggtcaatgttgccgggtttttttttttacccataaaacactgtgttagactccagctttaaaggcctagtttggcctcgtgaacagaatggtagtggaagttttgtttatcgtggaagatgttttaggacaacatatcaggattgattgtatcgaattattattttagtgtgggtttttagcagaatgttttgtttgggggaacaataaagaggtcataaaaactctggacgctgtgagctctgtgccatggcctgagtatgtatcccctgctcagcagagtgtgtaaatggaagctaactgtgtgctcagtgctagtgtggtgtacaccgtccaaggctgtgcccttgtctctgccttgcctgtatccgtattttatgggtggaaagagaccgcatacagggcgaacagctgacatgtgtaggtgtttagaagacacctagaagatggccagagtggccatcaccacatgatgggacctgcttccaactctggatctcgggcacctccctcctgcaccttttgagtctctcttgtcttcattcttccaatttcctcttctgatcttcgaccatcacacatcctttccgagagtctggcatggcaggatctgatgctggcagccattgagtcaatttttgagtcttttgagttggtacagccatagaaacctaaccctggagaattcatagaacctggtggaagtcacaaggttgggcactaagagtcaggatggaagtccacatccaaccttgaaaccatcacttcctcttcccgctcttctgcagtgccttgctcgctcacagggccccagggattcccttctcctcgggccatcctaggaaagggagtctgagttccccgatttgccatacaagcatgccagctctaggtgctgcaggcttctatttggcttaccagcgtaagcccacactgttctcttgttgtaggtgtaccactcctgtctcaccagtggacgtacaggtccagaatgtatctgtgtcaccatttggaaaactggtggttcagagttccatagactccagcgtcttccggcacaacggcacggtggagtgtaaggcctccaacgatgtgggcaagagttccgccttctttaactttgcatttaaaggtaacaacaaaggtatatttccttttaatccaatttaaggggtgtttaggctctgtctaccataccataatcttacatccattccagtattggtcatatcatttccagtaataccgacagtacagcagtacaccatgctaccatcaaacgtcacaaactcatcccatactagtctgctgatgaaggttttgcagttactgatggaatcttaactatttttctttcgctggtctttgtgtgtttttatgaacttcttgacaatgagtaatatacgtacagtcatagttgggtatacaccagtataattaggacacgttggaaatgttaaattcaatttaaaatttcagttaaaatgagttacattttgctaaacatctgtatcgaaatgttaacagtatcttttatgtgatcttgtcagcaaatgttttcttttcctgttctatatgtatgtgtatgtatgtatgtatgtatgtaagtgcttacccatctgcactgtcagaatggtacagagcccactgcaggctgtgtagatagcctctatgtctagctgtgactaggcttcttgtctagcgactgagtgactagcagacctttgaaggcattgtggtacacctgagataaggaaacagggcacttgaggttttttagtgcccagtttctgtggtgtttagcattggccataggactcatgccaaaaagctgtatatcctcagtttctggatgaggaaggggacgcatcataactctgctctctgttgttaatttccccagccagagcaatgaaaaggatgcttccaaaatgtctttcttctctgtggaagacacttacgttcattgtagaaactttagaaaacgtaagagagcagaaagaagcaaatgtaaatcacccagagaggcagtccattcagatgtagcttttcattaaaagcagcataacgttaagtgtgttacttcaggaatgtcagtttctctgtactctggtttcaacttacatctttaaagatgcctgtgcagccagtaaggatgtgtttgtgggtattgtgctctgccagaacacatgaccaggttctagtcctagcaccaagaataaatgtaggtaggtaggtaggtaggtaggtaggtaggcaggtagctagggagggagggagggagggagggagggagggagggagggagggagggagggagggagggagagggagagatgatgtatttgaataccaagagaaagctttgttccctgaatgtgccatgagggaaatggtttagtttgggataggtggtggtggcggcgaggctgttgtcctgcggctgctggctcacaatcatggttcccttccttgcagagcaaatccaggcccacactctgttcacgccgctgctcattggctttgtggttgcagctggcgcgatggggatcattgtgatggtgctcacctacaaatatttgcaggtgagcattgaattgttctcttcctggggacgccaaggcggcagggcaggcactgattgttcagcgggtgacacatctttcttttcctttctcctccagaaacccatgtatgaagtacaatggaaggttgtcgaggagataaatggaaacaattatgtttacatagacccgacgcaacttccttatgatcacaaatgggagtttcccagaaacaggctgagttttggtcagtgtgaggcaggggctttccacgaagaagcccttttgtgtacgcgtaaccgtgattttttttttttaaggaacccgcagtggcttcctttgtcttgtttcacctaaaacaagaagtgctttctgtcaaactgcacaggagttggcagggttagcagaaagagccccgtagagaagtggctccagacacacatgtcttccattgccttgttgatttgggaacctcacaaactgttggttggtcttcccactgacatgaccctgccttcttccttcctaaaggaaagacattgggagctggtgccttcgggaaggtcgttgaggccactgcatatggcttgattaagtcggatgctgccatgacagttgccgtgaagatgctcaaacgtaagtgtttcgggggcactcaccccctgtacccaccaccagtttatctaataggttcttcccccctgcccccacgctttgttttgctaaaatacatcactttcccttttagcaagtgcccatttaacagaaagagaggccctaatgtcggaactgaaggtcctgagctacctgggcaatcacatgaatattgtgaacctgcttggcgcatgcacggtgggaggtgagtctcgagttgccatctctctggttatcaaagtatgatttaggcagtgcctagctataagctacttgagagattttttttttttaaccaagcattttgttctattttgctaggtttcgttttccacagtgttcctcagaatgtagatttttataatttctatgctgggagccttcagactcatgtcttgtcatgattttgcaatgtaggttgtagttgttccgctgtgtggtcgagtgttggaactactcatcacagttgtgtttggtacccattactcagattcttatttctcccctccctctccacagtcctaaggacctctattctgccctcagtggatcaacattttaaactcccacaagcttttgggaacacacaaggtttctctttatgcagagccacttacaccccgcctttcctcattaggcattatatgtgtgtattgaattataatactctcccccttaaatggcataagcagtggggggcaggtagctttatataatgcggggggccgtaatcagtcatttgagagttaatgttgattttccttctataactgagagtggccccagcctcccagttctcaactgtacaccaagtagatccagcttttcactcccacaaaagcaagctggcggctctagcccctaagtcagagtgccaccaagggtgcgcaggcacactgttctacagaacaaagctgtgtagggtgagctggtgctgtctgtcctgagagagccatgggatggtaggcagcttagacaacgtctccggacagcccacagacccggcactctgcacaccatgaattgttcatgcgacagtatctacccatggcaattagttgcctgttaagttcggaactgcgcttttaaacatcctgaggaaccactcgtgttttcaagtagtcatgctcagaaaaacgggccggccgtttcaggggtttttttttttgttgtttgtttttgtttttttttttttttttttttttttttttttttttttttttttttttttttgccactttccagtatgggcttagctggctgttccctggttacttccctactaggcttgcatctagggttcttcattttcatcataacattatggcgaggacccagaactgttgcgcgcgctcacgaccggccaggaagaacgacgctgctacaggatccttctgcacacgtttattcagtcctgtttcttctttctctatatctcccttgtttatatctcccttgtttatatctcccttgtttttatatctctcttgtttttatatctcccttgtttatatatcgccctcgtttttatatctcccttgtttttatatctcccctgtttttatatctcccctgtttttatatctcccccgaaccctgggcctctcactccttttatactctctcatccacgcaccgcaggccacgccccctcgccagtcacgaggcttcagctaatcagggcagcaggggcaaatctccaccaaattggattcacctgtatcctggtacacctgcgcagcactcaagatgtttgtgtcttatatgaggaagtcaggtgcaagtcatatgacttagctgcagtccctggcgcctttgggactgccgccacacccgctccccacaattcccccttttttcttttttggcagagagaatgtctgtagatagcccctcgcagccatgccccttacccgtccttgggtgacaaacagcattggtttgatccctgtcttaggttggtgacatgcccagggagtcttatcactgactacctctctatcatgccaagccactcctggggagattgtgttttgcttgcggcaggtgcatcaaaaggccaggatgttgattaatctatggccagatcttaatcgctgcaagcaagcctcatgggtgaaggtagaggtctgatccccagtgtgcaagcataggggccctacacaaaaccatcccttaggctcatcacccagagaggtcttggccagctcccctgtcgtttttcctgggaaaagggaactaggacactgaaccttcatgcaatcagacgtgccttccacaggatgccaacagcaagctatcctctgtgcagtgcttagccttgcaccccacggcataacgcagcataatttcttttagagcggcaaaccgaatctgaggagattgtcccgcctccactgcagcaaaagcctatgctaccatggcgaaagtgcgggccgcacactctgcacctaacacatgtgccaaacacaaaacacacacacactataacaagcatacatcccagggctctcatccccgctcatcttccctgaagcaagggatagatggccagaggggctatatctttaaggggaattcagggatcaaaaagcgatctcccatctcggctccatcctttatgcttgtgggatcatccaccacatccacaggggcaactggatcaggagcctcattcttgcagcgtctcaccaatctctccggcacccaaagaggttccatctggtcctgtggaaacacacaaacagaccctctcgcccacgtcaacaccagatctggtcgatcctctccaaatctccggacagaaggtccacctacaggtggctgctgaggaggcatagggaggcggcacaaaagctaattcgccttcctcctccgcctcagctcttttattttgtcctttctgtccacctgataacactgtgtctcctttctttttcctttttctttttaagcccttctcctcttccgacatactttcttgttgttctataaggattttctgacctgtcttgactgcctctacacacagtttcaaacagtaacagagtccatatatcagaacaaacaagaccaaaactatcagacctacccacaaagggtcaatgggagaaaaaagcataactacacagcgaggatctattgatcactacactgaggttatcatagttccttaacttgtccccaaacagggaaccttaacttgtcccaaagccgggaaccttttgttaccttgtgcctgcttcctggcaactttatgctcgcctctattttatccgaggtccttcccaaactcctgggttactttgtgcctacttcctggcaactttatgctcacctctattttatcgaggtccttcccaaactcctggggtcacaagtttcactcaccgtgaacttaccctgccagcaaccactgactgctgaaagttctgaactcggtgggggagtcggttccccgtacgggccaccaattgttgcgcctgctctcgaccagcaagaacgacgcgaccaccagtccttctaacagcagtttattcagtcttcatctttcttctttctcttcatcagtaccgttccccagctgaagagttctgaatccacgccagatccttctcaacagtctgttttacaggaacacttcattaaccactccttccccgtgatgcagttctgaatcctccctgtagtagggggtcttcgctcatgcctgaagatgtttcttgtcccgggtttcggcaccacttgttgcgtgcgcccaactggccaggaagaacgacgctgctacaggatccttctgcacacgtttattcagtcctgtttcttctttctctatatctcccttgtttatatctcccttgtttatatctcccttgtttttatatctctcttgtttttatatctcccttgtttatatatcgccctcgtttttatatctcccttgtttttatatctcccctgtttttatatctcccctgtttttatatctcccccgaaccctgggcctctcactccttttatactctctcatccacgcaccgcaggccacgccccctcgccagtcacgaggcttcagctaatcagggcagcaggggcaaatctccaccaaattggattcacctgtatcctggtacacctgcgcagcactcaagatgtttgtgtcttatatgaggaagtcaggtgcaagtcatatgacttagctgcagtccctggcgcctttgggactgccgccacacccgctccccacacagaaccctgcctaccgtacacagcagtgaatcaaaggcttcctgtagggagcttgatcatagttgagcctttgaaagtattcacttgtggctactgagccagccatcacgcctgtcccctaatgtcacttagacatccaggtagaaaggggcttgcttgtgctacttcactcagcacaatgctgccttttttgatgagcggtgttaacagatagaattatgttgggactaagaaggcttagccactgaatctgaatgttaatagccgcggtcacccatgggtatttttacaggaggcgggattatctaaggtatatcatcttgcctatacctaacattgtcttctatcctcatagggcccaccctggtcattacagaatattgttgctatggtgatcttttgaattttttgagaaggaagcgtgactcgtttattttctcaaagcaagaagagcaggcagaagcggcactttataagaaccttctgcactcaacggagccttcctggtaaggctgatttgcataaacagtcagctgttgacaggcagttcatggggtcataagggtttgcaatcaaggctgattcttttaaaaaatgagcagaggtgctcctaggtgtgaaatcagaattattaaattgtttaagcgtgattaactattccggaagttcagatagtagtacccttgaagattcaaattgagatttgtcactgatttctcttaaatgtgtgtctctgtccttccttcagccttagtcctgtgggattggatgtgtcactacttgtagggaagaggagaaaggctgtcctatggtggttaagtcctggagactgcgcagactggccaagaccacccagcatatgtagactactagttatcagcattgttttggcatccgagtctctccccgcccctggtcccatcccatgccccatcattttactgcattatagtcacatcactatcaaagaacgttgtttgaattctggacctcatcgacattattctcatggacgatgatgcaaaggatgatggatgtatatgcaggttcaagagccttggaggaaacctagtttgatgcacaaccagagtagaagtcatggctgtggcttgtccatcctttcttccccaatgtgcttgagacccttcaggcccagtggatatcataattgccccctcgtattttatactgcttccattgtggagcggatcttacctctgtttcatgtttactctaagccccgggttcaaatcccagcaccagaaactaatatcatgaaatgccataccaactgtctttaaatggcaggattttgtctttggaggccttaaatccaggcttccaaggagacctcagttaatgggcgattaccatcgcccagtgtagcctttgccaccactaaagcttaaagtcccaagagaagcctcatgctttcatttcagtcctgtaattttgagttgtttaacatggtactaaaatgccaccaaaacccaccttttgttagttgttcttggacatagactcctcatacggaggcaagagcctctttgccttgtctggagactgggccctgtggtggtttttttgttttttgttttttaaactttctgaaataatggcctgaatcggtccatcctgtgtgatgttctttgcgctttgggatcccatatgggtttggagccaccagcacgctctgaaggaggttgttgtcatggtgtttctatgctaatcagaggcaggaagtactagaaatcttgaagagtctccagccaaatgttgcagattcaagaggtccagatggtctagaaaatcatccaaattattggtgtttatctgaaccaaacttgggttttttcaaaccttcttcccttcgtggctgtgttcaccatctcccccctcaaatgtcttcgaagtgcctgttgactttccatttgtctgagtaggggctaatttagagtctgaagtaacctgaggtaacattttttagctctgtttttccccattgaattctaactggattcccccccccccaagacatttaattccctgagaattggaccttagcgttgaatggcaaatatatgtatcccacagaacctgattttgaaactttattcaaggcttgcattgcttttcttgccctggagtcagtgctgcacggtgaagtgggtgagaacgggaacctggcctggcagtgccatggcccccacctgcctcacaagtccagtcccttcagttctgacacgggtctcgcatctctcctgcagtgacagttcaaatgaatatatggacatgaagcctggcgtttcctacgtggtgccaaccaagacagacaagaggagatccgcaagaataggtgggtacccaccaactagccagagcagcttaacacgctggggttgtaatcaaatcttgttcctttttttttttttttttctcttgtctcagggagagggcttaggggtcaggggctgagtctgaagaaacatggggcagggattgtgcctctttcccactaactgaagcgagtacagcattccctggaaggagctaccggtggcaaaggaaattggccggtggcagttaacagtacacaagcaaaagcacatgtttttatatctactatctcactgttacagttgtgagattttgaagatagaccccccccccccccatcatcctaaggtttctggaacccagctggggatgatcagatagctattggctttgtgtctaccattgttcctccctggggaggtgactggcctgggagtcgacactgcttatccactgctagctttgatactaaggctgcttctcctctccttaccactaagggttttttggttcttgttttgtttttttttttgttttttgtttttttttccttgctatcttcctaatagactcgtacatagaaagagacgtgactcctgccatcatggaagatgacgagctggctctggacctggatgatttgctgagcttctcctaccaggtggccaagggcatggcgttcctcgcctccaagaatgtaagtggcatggagtctcatgagaggagcacggcatcctttttttttttttttttttttttttttaaagccttgaacatttcctagtcctagttagaattcagagtgtcattttgaagtgtggtaaccgaaagcaggggaaaatttcgtttcttcacgttccaacttctgtctctttggaattcctgttctaatttctaagcttgaaagcgcaaacctgtctaaatgagcctccatgaatattcttttatatgcagtgagttcatttaaaagctttaagatgtaggatgcgcttctagaaaatagaaggatagtggttttatcagaaaatgggggagccaggagtgtgactccctcactgttactgtgcctggtaaggcatatgactgtgtatgtgagacccacgtactgtgtatgtgtatgtgactcacagaggatcaggacatgagaaggggtcagagagagcatggagcagctagggaaaggatagagacgggaagagagggatggcacgggatgaaagtgttccggggaggaaggtgtggccaagagtgaggtcacagtggctcttctagtgacattcccaggtaactaccaagctaaaagacaggctgaaatgaaagaccctcttccttgtgtccttgggagaagacgtcaagttgaagctgtgaaactttttttttttttttttttttggagaaaacgttcaaagagatgcatacaaaatgaactttcattttagaaatgggatttgactatttataatgcattttcctgtgaatggaaggaagggagaaagacgtttattaaaattgggttggaaagcaattatagtcattagagccccgatcctgtgaaacacaaaacgggaatatcacttgcaccataatttttattttcggtgtgctaaatactttaaaacgaaagtttctttttttttttcatgtaaacaccattgtagtattaaaatcatcttctctcggagagctgaaatgaatggctgttgctgtctttccttttctcccccaacagtgtattcacagagatttggcagccaggaatatcctcctcactcacgggcggatcacaaagatttgcgatttcgggctagccagagacatcaggaatgattcgaattacgtggtcaaaggaaatgtgagtacctttctccatctcatgagtctacccagggtgctttggtatccagtcttgattctaaattgttttctatgatcattacaactcctaccttgtaatgtcacatgttagtaccactaaggcttgttaatagaatttttagctataattgtataattgggggtgtgcgaaataaacaaaaatagccttaatttttcacgataggctgaaactagcaatccatttgattttgctcaactataacaaatgtagacctgaaggtcacggtaggctttctccccgcttcgtttgaaatactatgtggaaatgactacagtctaagatggtgttagagttagctgtatgcaatactaggatgcttgggtctcttaatcaatatagggctattaagtagattcataagtaatggttggtttgtgggacacagtgaagttttcaaagtgccagccttctgtaacctcagaacaaaccttagaacatgttgtcttccaatgtttatagtggaagaaactaaggtccagtatagttcagtgatttatatctgagatagctagtcagcagggtccactgggtagggaaggccataacctcctagatatatattcttaggtgcgtttttcccctcagcccatttgaacagtccatatttattcctggaggtcaatttttgtgtctgtcgtgataacgcagttccttctcgttcatcaccgtggcggcagcatctctgttggtaggctgtgcatgacttggttttgtaaggaagggtattgctggctttatatcctggctcagtcatacagttctgaagagactgtcaaggtcagattttttttttccaggaggtttgatgaaatcaacttcctggcttaatattcgaaggaagatgggaaatgcttcagtattccaggataaaggagcaaaataaggaaatggggtgtctgggcccaggctggccgagttccagcctggtcccatttaacgggggtgggaccgagtcagtacttgtaggagttactacatggcagagttctcagaacagggccaggcccattctcctgctttgtgttttgaaatccaaaccatcaggacagaggttgtgcccagaaccttcctagctcagtctgtagttgacaagtctagccgttgaactggccaattatttgagaaagtttcaaacaagggaaatgtatgtgacgcggcgctgcatggaattttaagtgtagtcattgtaaagtccctttgttctctgaaagatctttcagagttgtgaattcttaattattttccacgctgggctctgagtctacgggcctatgggccccttgtcagaataccatttcagatgaatggaatacttatatttagccaagaaaagcagactctgtcgaatgaccgttgtatcgaattctgtaaagcaaatttagtggtagacgatgggcgcgcttctttattacacggagcaacatatcataaaggctgttgtgattttcaaagggactgcgaatggaagttttcttttgtaattcctgtaaatactgcgatgggacgtgaagtgtctgctgtgaaggacaagccacagagcctcttttactgctttgtctagttttagacaaccctagatttcacttagaagttaatttttagatacccaggccccttgaattcaagacactaatagatcctcacttaacactcctgtggagaacgcagcataaagtctggggatagatagtagatggtttttatagtttgagaatcatctcctccctcaaccctccacccccacccccaccccccacgctaaaacaacttcaaccctagaagggctctcttcctactgttcagtcgtaaacggatttaaaggattgattctgcctcatgtgacagattaatatccagaaatcctgatagactgtaagaggcaaggtcagagtaagcttggcctgaccgagtggaaggaactggaatgtctcctgacataagcactaactgtgcgcgctcgcgcgcgtgcacacgcgcgcgcacacacacacacaccacagagatcagacacagctcatcagtgcctgctagtctgggtaaatcttaatgagctggacgttggtaggcatttttttatcctgcattgcctcagttgtcccatgaaataacaactcctggtatttgaagttatttttgttttgcaaaagatgattctgggcctggcttatccgtgtttaggtaacttctctagtaggtgcgtgaggggtgcacttgtgtcagaggtccaagagtgaatgggaagggatttggggccaggcagagaattctgaaacaacacttagcactgaacccttctgcctctctgttttgtcattcctacatgtagccctcctcattctggtcaaagatgaccggaccaacagccagccgtcatggtataaggcagatgtgtgaagggatgccactagaaagactatatatatatggtgtataaaaccacagtattttaagtgtttttttttcctcatgccactgcataaaatttagatcttagcagctaaaactaagtggtctggctatagcttgctgcaaagcagtctgggaaatgtagttatagttgggagaggccatatatgttgttgacaaaaaaaaaaaaaaaaaaagaagaagaagaagaaagttgctagttgaggccattactagaaggaaggttagaacccctggacttctctgctcttagtttactgtcctatactgactcaacacccctattttaaagggagatattagaattttgaattataagtaggggaggtggctggaggtcacaaggtttaaggtcctcgtctatcgctgtcttcattagctgcttgaatttgctgtgttccgttctaggcacgactgcccgtgaagtggatggcaccagagagcattttcagctgcgtgtacacatttgaaagtgatgtctggtcctatgggattttcctctgggagctcttctccttaggtaaaatgttccttacccaagatgccctcactgtctaaaagcttctgtcgtctcccgcccacatggacactgatttgccacctctctgcacccaggaagcagcccctacccagggatgccggtcgactccaagttctacaagatgatcaaggaaggcttccggatggtcagcccggagcacgcgcctgccgaaatgtaaggactcacaagccttttcttctgataatgtccttttgaaagacagaaatgttgacagtctttgctagcagggtttgaaatgtcactcacttggttcttgggccacccgcgctcaaatgtcatggctgtggttcttttcataatctcttgtcaccaacagcaccgaagcttttgacagtatctcacacacacggggtcttattctctgtatgtcactcacgcgctatgcacatcctggcacaggcccccagatttgttattgaagttgtcatgtgctgggcagcagaaagcaggttaagggaaccaggagtgacaaacaatgtcccctccccttcccacccctcctctctgcttctgcaggtatgacgtcatgaagacttgctgggacgctgaccccttgaaaaggccaacattcaagcaggttgtccaacttattgagaagcagatctcggacagcaccaagcacgtgagttaatgggccaggcctggaatcctctttctccttactctagggtcacagacacctcaggcttcaaaggacaaggaccaatctctcccacctcccttcctggttgaattataagctgggcttccttctgcgggtggaaggaaaacaatgcaagcccattctttctgcttcctcccacccacctccacccctgttctcatccagagagatgtgagatgggggaggggctggggctggggttctgctgtgtggcattagatggtgtcataaggtctggccgtgcttcctcccagtcctggaatgttgatcatgggactgtctggtctcctcacgtggcagggccagtcaccctgggtgggttgaggtgaactggaatgaaagtcatggctttcgtagcttgttacaacagtcaagtgaactttaaaacagccggaaggaaccagccagccgccgcaatggctgggatgcccgcagctgtgtagaagggttggctgtttgaacttaggacatccctctcagtaatgtggggagtgcggaatgaactaaagccattgtttcctctcttgcttctaaggaggaattggccatgtttactgggaccagactccatttaagccgccctccccctcccctgagccatctgcgggaactatctttcctaatagcgcaacactgatcttttcgagttagcacttgttctgaggggcatcaaggcacatttcaaatgaaacgccactttccacccaagtgcttttgattcctgacaaaccacctttggaagagccatgggtgccactgcaaattacaccagcccttgggttgcagttggctctagggatcctcagatcttcttcacaggctagctagtacttgctttcagacacaccccagccgaagagaaacattgcaggcagtgttgtacctcattctcgaaatgatttacctggggaaactgaggtataagccccatcttgatttttgaccactcttccttgtcttcaggattctgcaacagttgagcgggccccatttgctgggttttgtcaccaagccgctgtatttgaccgtgggctctttctctgcagatttactccaacttggcaaactgcaaccccaacccagagaaccccgtggtggtggaccattccgtgagggtcaactcggtgggcagcagcgcctcttctacgcagcccctgctcgtgcacgaagatgcctgagcagaaacccaagtccaacaggctttgctgctgtctccgaccccgtccttctggcttctgtgatggttacttggtttccctttgacttgcatcctattccagggtagcgagttccccaccccacctccaaccccactgtgattccgcctttacgagcacacactttagtggccgatggccttttcttttctgccatcagccaccgtcccgctgcgaaggtccgaactgtatgtatatattttcccaatagcaaagtagctcctactgtaaacagaaggactcctcctgctttagaggagaagggaagggcggggtgaaactggatgcccagagttcttcccccagtgctcccctgagtgtatttgaaaagtatggccagtagttcacttgaagaatagatgtagtcccatttggccctgagagccatccttaatgatgggagatatatgtagcaagactagaaaaggaaagccaagccctttgtgtagaaagcagaccattcttagaacagagggcaacggggcatcggaagtctggtcacgctaagaagaccgaggctgagaaggaacaagccaggggaagcgtgaacaatgatgctctgctctgggctgccgctcgggcttctgtacaactgacctggtttctcagtactttgctgtctgggagtagcattggaatcaaggcctcctccctagtcagcctttgtatatactcatctatacgttgtatgcgttcatactttggaggagggatttcccacaagctttcgtttctgtgtacagccctggcattagacctactgtgtgtaagaatagattaagagccatacatatttgaaggaaacagttaaatgttttttggttgtggttgttgttgttgttgttttaaagaaaaaaatgtatatgctaagcacaatctttataagacctcttagccaacatacttgctctgtctacacttcggaacaagccttccatgtcagagtggctttgcaggcaggagaactgaggctgtttgaaaaggttaccacaggatggagaaaacagtgcagtcctggtttggattctcacatagcagggagcacaagttaaactcagccttttataggcacgtcccggacatcgggccagtatctattcaagtgtgtatgtgtgtgcatgcgtgtgtctatgcgtgtgggtgagttgtgttgggaaacttgccctgcatccctgagggtcctccttcaggacccaagacgtaacagcttctgtcaccgctcctgtctctccagtttccctgcatgtcgctcactgtctagaatttactcaaagccgccacagaggcttagcggagtgaagtgccgaaggacctctttatttggagtcctcctgtatttaacaacactcttatcgtagacccattcattagaccttatgtaatgctgccaatccagggaaacagatttaaagtgtaccccgtagacagggcccagaggttcccttgtccttgccctcccccacaccacccatgatcactgtccaacataaagggttcagtgtgtacgtggtcatgtgttgtccttacaggattcaggtatgttgccttcacggttttccccaccccctcctgccctttatcctttaggccgtgtggccatgaacctggaagaagtgatcgtttgcacttgagtgctacactcttgcacctttccaaagtaagctggtttggaggtcctgttgtcatgtacgagactgtcaccagttaccgcgctctgtttgaaacatgtctttgtattcctaatgacttcagttagagtaaggagaatagctgttaatatggatgtcaggtacttaaggggccacaccattgagaattttgtcttggatattcttgaaagtttatatttttataattttttttacatcagatgtcagatgtttctttcagttgcttgatgtttggaattattatgtggctttttttgtaaatattgaaatgtagcaataatgtcttttgaatattcctgagcccatgagtccctgaaaatattttttatatatacagtaactttatgtgtaaataatacgctgtgcaagtttaaacatgtcacgttacatgtgggttttttctgatatgttgtccaactgttgacagttctgaagaattctaataaaaatgtaaatatataaatcaaataaatttttctgtttgtttttta

SEQ ID NO: 20 - DNA, 86372 bp, Felis catus
ccgcgctccgtgcacttgggcgagagcaggaacgtggaacggacctccgatcccagcgcagccaccgcgatgagaggcgctcgcggcgcctgggattttctctgcgtcctgctcctcctgctccgcgtccagacaggtgggagagcgccgcggacagtggggccgcgcccccccaccccccgccccggagcagcctgtgccccccagggctcgaacccgcaggggttcgtcggcagaggtggctgacggccctccggtgcccttgcttttcagcctccgggaagattcgaggcgtccccgggactctcctgcgccctgcctcgctcacctgtgcaaggagcccctgccgctggtggcgggggcgctgagctgggggtcttccgggaaggaggacagctagggggctcaagagtgggtgaggtgcggccgcaggctgcgttcgagttcggggttgcttttgtgccgggggtgcgcgggggcacaggcgggcgggtcccgggtccgcacccagcgcgttatctccgcggtgcgaggcgcggccactgcttccttttgttaaaagttgcgcgtgtgtgaccggtgcactggaggagcagcccgcaggttctctgccgcgccgagggcaaagttggagagccttttctttgctctgtggctgccgctttccaaaccgcgggcgctctttgtgccccagagctggggaccgacccgctgccgcctctgctcgctgtgtcctcgggccctcccgttaggcattttgtctgggaaacgcgcggtgtgcggctctggagccggaccccgcgaacctagaggtggcggctacagggacaacttgggctgggcgtgtggaaagcagccgctaggttgcagactttttgcttttgtaaatcccatgccaaaggctcgcccctttccgccgcggtgccgtttctttcctgccacgcgcctccgagcggctggtcgccgcgtttgccgcctgcaccgagaggaggcagggaccgtgcgctggaacgctcaggtcttcgacctggtctcctcccgggtctggccagaatgcccagacaggctggccggcctctgcaagccgctggaataggtgtctgcgacccgtacttgcgggtccccgttttctttgggaattttgagatcttcaacaccccttcccacgtgatagctacactacttaagggccgcctggggcgggggtgggagatggagtggaactttctgcaaaatcttacttggatcctaaagctgtagtgaaaatccggttttatctgcgcgggaacttaggtctgaaggtggaggaggaggatttgcaggctcctgaaagccctccgattcctgccccttcttccctttttttttttttttttttctgggtgtcgctagtgcgcgagcgagtgcagatcgcccaggtaacccctgaaaccctgctctctcccaggtcattttttaaagaccttcaaggcttacctcgctgatgcagtgggcagaaagtgagtctgaactgggattcacgggctacaaaaggaagcatcgctttgtactattgtggtactatattaactaccggtcagtttcccataaagtctcaaggtgtagcctcttcattcacgggcttgaagggcattgtgagggctttccggtggaggaagagaagccttgcatctggaccggtggggggggggggcgggagagagattataagtgagtgcccagattccgtggcggatttgaccgctctaagctcaaatgacacatttggtccttacgtctttgtgccttggcatttttaatttcagttatgcgtgtggacccgaatagggcactagaaagacaagggcagaatagtttccccgtttttaaaattcaaagaatcagtcgcttccttcctcctcctaattatccggcttcctcgagcagatttttggcgcagggaatttaaaggtctggctcctggggggcagtatggcatagtgacaaagcctagtgctgcccttctggttctccttttccagccatttattagctgtgtgcccttggcaggtcgtttcaattctggagatcccaatttcctcaagaggacagtgaagcatctgcatcaggaacgaccctttgggtcccacattctcctcttccagtgttctgagtgtagactacagtttttctgaattccttccccgattcctttctgcctccctgaaattcctctgccttttctggtcacagggaccacgggggggggggggtagcctcctggtcccctgcccccgctgaagcggggaggtgtggtttatcctgagtcgtcttcaatccacatgtgtgcctggtttccctttgaattcaatcaaggaggtgcgggctctgtaggaccccccgtcactgctcccctcagtgtttacaacacctgtgcccagcaagataagcctgtaaggaatagtgaatcatactttcccctcgttcctgcaggtgtgaggccagagtcagagccggaagctggacacgggacattttggatgtgatcctgttgggaataacatgatggtcttggaaagggatcccagaaaagtcacatcccccttctcgtctttcccactcatccacacatttttttcttatgacttgataaattatgtatgctgtgttattacaacacatttttctgacatgccttaactttccctttatgtgtctgttgtacatagttgttctttattcaaccgggctaggcccatgctggggcctttacatggtgcttctagtcctctcaacaagccctagaggtagtgctgttaccattcctaccatttcatagccggagaaactggctgaggatgagtcaattacccaaatagtcagtggtaaagcctgagattaggcccatatgcccaactgtataccattcacatgccttaacagaatcagttgtgagattcattggaaactatttgatgagcacatattatatgccaggtatcgttggagattctgggaatacaggatggtcaaggtcattaccttccaaatattggtagaaaaagacctagaattgcctttcttaggatgggtgggtgaaagtgttctcaatttgagggaagtattcaccgggaaggggagtcattaaatgtagcttgtctggggggtatgctggcactcgaccctgggcatgagggctgtatgtgttagatgtgccattccagaagccctcagaaatgaagataaactgtctctaaaacgatggtggaaaagtcagttgagatattgtgccatccacctttccaaaaaacaaaaatggccttcgcatcgtatacttggggcatgctttgtgaaagcgaaaactcccaggaatgagttaacgccactggtcattcaccctggatggtcaccatgagatagaagggcagtttcccccttagagatttaccacccagacagactctcgtcagaaatgggccaagtgtttttgtgggctccctggcagagcatttgcgtacaggtgttgttttgatgatggattttgctgctgttgttgacggctgctagaagctgctcttaggattttgactcatttcctcaagtctcccccagctgattaaagaaggacaccaggaaatgagccgcggtgccctgagcggaattcttggagctggccttgcaggatgggaacccctgaaaggctgtggtcaaggctacagcagcatgatccagaatgaatttagtttaacagttgacagactgggacgtgggaagtgctttattttgccgcattcctgtgtgtgagctttcaaaacaagggattgaaagacatttgaagggaccttaaagacgcaaaatttcatacgcagtttctgtaacctgaatagagagcttcgggggctgcaaatccagagtgaggagggcctactggggagttggcagaggcacaagtgtgaatccagggcaaagccagtgtaaatctttgttgaaagtgaagggaccaagtaagcctggcccgtagtacctctggttttggacattttggacgtgaaacagcccatcttttgacctcagattctgaataagtagagcttacaagctgataatccatgaacctgtttggtacccccccacccccaagtgatgctttattaaggaaacatcaaggcaatacttaagaatctggagaatttatgtcaagaccttgatttctctgttctcttgaactgaaggatcagtcctctttaggaggcactaggcaataccactctctactgcccttagacatttaggcatttagccttaggccctggcgagtgcagatgggaccatgctggtacctagcggacagagcacaggcctggggaatgaagacagccttgtgttagtctgctggccccatggctgacacatttgggaccttggagcaagtcggctgccctgctgaacttactttttcatcctcctttcagctgtgtgactttggcaaattacttaacctctctgtgccggtatacgtgcttctacataataaatttttaggatcgtgctgcctggcacacttttagtacaaacataatacatgtcagtcataattattatctgtaaaataggaattattgttcttccagaaatggaaataatgcctgctctaatatgattgtcctaaagattaggaagagactcttgtacagatgcttggcacagggtctgggatgggacggcacctaataaacgagtaacctctgtgactatgtagaatttgccggtttctctctgtaatctttgcacgtaggtaccagtaagtactaacgtgacagcttttaatgtgaaataaactttaatttttgagttttatatatggcttttgacccaacacttcggaatcactactcagggactgaacagatcttggcctttttttttttttttcctccttcctcccagaaagacaaacaacccagaggatttctccaatgaaagcattcacatctgctgatttttccattcaccgtatgctttagccttaacgttttgcttacgacacactgttaggtatctccagtgcatatctttctgacagcgaggtttttgacgcttgcaaacttgaagctgaattgttagccagcacaggtggcatcagagttaagagctcggggttcgaaagggacaacctgggtttttacgcatttggccccttgctggccgtgtgatctgggaagagactcttcacctctccataagcttcggttctttttatgtgactcagagatgatggcatgggctcccgaagagagtgagtgaggtcacccacataacatgcctagtatggtgtccttgatggggacagcacagggacttcactattaggctgattttcttgttcctcttgcaggtttgtctctcaggaaaaaaaaaaaattggatatagtttaaaaccagattatgtagaggagtttttatggtataaagatgaaacgtatacatttaatgtctagtttttgtttgtttttttgaagtccaccattagtaagcaatgcctgctttcctccccggttctttgttttgccttgttcttagcccgtttcggtggatacaggttagatttctggacgcaagcttaggaggggaaagctctgtaaaatggccattttctcaaggtgagtaagtaagggtagctcacatagggtccatgaaccctgtgtgatgcagcattgaaagcacctgaagggtgaggggcttttctgtgactcccttccttccctaagagtgagggacccccgccgaacttggctgttgccccaggctagacacacagtggtgctcctgggtttaatatctcctgttctctagcactcagagggtgcgttgaacataagaaatgctcaataaacatgtcagactccgtttaacaaagatctatgattccctaggccttggtccttgcagggactgtaggtgtgggctagaggtgggggagggatggagtaagagcacagcgtctgaccagaatcgcatttggtgtccaaagaagtgcagagtgctcaggcaggatttcaaaagagagacgtttatgtcttggtgggcagatgatagcgatcagagatctttcaaagtgtccatgtgggagataatatttgagattcatttctgcgcgttagagggtagagtgtctgtaggtgaggcttcgattgggaaaatgggggatgtggaaataggggattaagacattaagatctcatttgaggattgtcagtccttgcacttggtgtgatggttggggggggggggaggggatagggaggggaagaggctggaaaaggtggcctctttgattcgccacaaggagcactgtagggaggggatatttaatgctgcgtttggtccagattctgaaaagagcttagaggtcagggctaaggtggatctgagccagtagtggctctctgggctttgcttactaggccaggaccgcttgcttcaccttgccgtccagtccccaacctgctccgaaaacttgggccaccttgcttgtaggtaatgaagactgaaggggtgtgtgtttaccctttagtaaaagacacacgttaatatttactatctggattatttttaggtgtccagttcaaccgcgttaagtacattcacattgttgtggaaccccatccccagaccactttccatcctgcaaaactgaaactctgcgcccatgaaacaccagctccctgttatcccctcccccagcccctggcagccatcattctatcttctgtatctgtgaatttgactacgctagggaatcattcggtatttgtctttgtgactggctgatttcacttaacataatgtcgtcaaggttcatccatgttgtaacatatgtcagaatttccttccttcttaaggagggaaatgtatgtatatgtgtatgtatgtatgcgtatgcatatgcacatgtataattttctgccatattttgtttctccattcatccaccaatggacactgggttgcttccgccttctggctgttctgaataatgctgatatgaacacgggtgtacaaatacctcaaggagagtttctcaggggcctcttccaggatggttcgtgtcatggctaagctttgtgctgatggggaggggagctggatagagggacagtcagactctttagatggcctctgggtgaaggggtgagggcctgggtattagggtgtgtgctctggaaagaagggaaaatacttacgagacacaaagaagataaaggtagccgactgaattcacttggcaaatttataggcatcttgggtgtgtcagacgttgatgaggttgaggcgaaggggagcgggagttattataggcgtgggtgactgggagaactggtgggaccatggaattgatggaaataaagtcagaggaggagcatcccgtttgaggggaggaatatgttggacactgttgtgtttgtctattgactatttacaggctgcatgaacttgaaactccatttcccagacatgatggtagatacaaatgagattcttcttaggcggtcaggtccacgtgagagcaaaactaaaccccaaaagtcaacagaacttagctgtgtaatattaacggtgggatatgaggattatgaagaattgtgtgttgtgtatcagtcatatgatgaaaagtaaattttcgtgaaaagaaatatatagcaggaggataattctgtcttcattctttgggttacacctttatcaaaaagtttatttttgagagagagacaatcgcataagcgacagatagggggagagagagagaatcccaagcaggctttccaccttcagcatggagccagatacggggctagaacccacgaaccatgaggtcatgacgtaagccgaaatcaagtgtaagatgcttaaccgagtgagccacccaggtgcccctgcattaagccatttttaaaggatgtttattggttttctcagagaaccgaatggacattttgggcttagaagaggacacagagttgattaaagctttgggaaattggccctttgaaggcaacttaaagaaattggatttattaggccagagaagataaggtgaagaagctttagtgaatgacagtcttcaaatatttgtaatatgtgagtgaagaatggcacaatgaaaatagtttaaattgccccagaaggaaattgagcttttttttttttagggaaaattcttttttttttttttaatttttttttcaacgtttatttatttttgggacagagagagacagagcatgaacgggcaaggggcagagagagagggagacacagaatcggaagcaggctccaggctccgagccatcagcccagagcctgacgtggggctcgaactcagggactgcgagatcgtgacctggctgaagttggacgcccaaccgactgcgccacccaggcgccccaagggaaaattctttgattgaggtttggaaaatactttattgcattaccagagctagtcatagggtcttggctgcaaatatgaggaaagccaaataattgtcattttgaaatggttaggccctgcttacctcagctggtttgaggacccctttcggggcctgcctggaatcttttctgaataaaatagccgtttttccttcttcactgctttggctttgcgttgagtcttccctaaattctggttcgactcgaacatgatccagcactcttcaccagttttggctatgccgaaaatagccaataaagagctcgcagcttcaaagcgggttgttgatctgttgggggttgggggtacctagccacagatggatcgtgcagcgagataactttagccgagtgccaaggtaaggggaacgaaaggaagttcgaggtctagagaaactggaatcgatcataattaaccttcacctaagaatgaattgctatttgatctcccaactgatggatacttttgagagaaagcccccggtgctgcgtgtaggcggagagatctgtaaggacgaggggagtccttctcccttgattactcgggggtggattgttggctctgcggtttacccaccagccggacttcccttcccacctgtcctttccctttggtcatttcatggtcatggctcgatgtacgtatcaggtcagcccgccgtccggtaggggaaggcggtagaaatgaaattgcagttcagcagcttcccgttgatcacaccatttcacttgtcatgccgaaatatgtgatgatgtctgagatgtgatccctgtgtttaaggagcctaggagctgtgggaagataagggctggggtgggtgctaatgtaatacgatttgtaataagatttaaagaacagccctggtccggaagccaggatgcatattcattaccactggattagaggaagaggcatcacttctgggggagagtggctgatgcagaggaagatctggggcctgagttaaatcttggttaaggaactggttaaggtatgaatccaaaaggaaagggttatagttagccagaagactcccatggaaagaatccgctggaaggtgagatagggtaatttcttaggatttttattcttcagcaattgccgtatttcctataatgccgtatgtgatgagatttttgttaagtgtaatctggtcaagcagttacttattcagagacattaactttccaaaatggaaaagtacagacctcacttctgcatgtattacacatactgtgtatgtacaatgcaaatccagaggaggtccacggatatgtactttgagttgctttcaagtccggggctgattaccctccctcccctgcctgcctcatcaccgccagcgagattacagattttgtaggctcaaattccaatagtggccagagatgatttttggttctttgcttattagcagattttaaatgtcgagtaagatgataatccaggcttgtagccgtctgcataaattcatttgtttaaaaaaaaaaaaaaaatccaaaacaataacaagcaaaaccccccagccttgataaggatcctggatggtttaggacatgttgagattctgccctgggttctacagccctgctttgtagggtaattagaaggtaattagggacactggttactacccttcccaaagcaatgagcagttggggtggggggaaggtggctgtttgtgggaggaaaagtcaatcacttaaggaaaagttatatatggggcgcctgggtggctcagtcagttgagcgtccgacttcggctcaggtcgtgatctcacggtctgtgagctcgagccccgcgttgggctctgtgctgacagctcagagcctggagcctgcttcggattctgtgtctccctctgtctctccccctcccctgctcatgctttgtctctctctgtctcaaaaataaataaaaacattaaaaaattttttttaaaaaggaaaaggtatatatgatggcacctgccagggaatgtcttgttcctaaccaagcggaaaaaaataataggaaaaactaaaagaggagaaacccttactccttttcttgttatcttaaagctcttgagtgaggcaaaacacctagcttccttagggtttaccccaggtgactcaggttatttcaatgggtgttaaaaaattcttcaaaaacaatcccaggctgtcagtaatttaaatagaatgacctatgcaggttggtcagtaagcagaattgcttagcaagactcagagcaaaagagggattatcacaaagaactttggaaattatttggtattgtctttttattggaaggaagtatttatagaaaggaatctaatatagatttggcttctggggaaaacactggagattttggaagtgccaaggggagtggaggggaggggcattggctctctgttactctacttggctagtgcatgtttaaaagaaaacaagaccgtgtttaaaaaattgagaattattctacttggaaagactgtgggtacttttaaagtgactcgggattttagtttgtaaaatattttaaatgcatttccattctgactttcccagatttcttttttaatgggtgatgttgagtcagtgtaccttgggaggatcttcattttaagaaagggcctggtaagaccacacggactggcctttaggcttcttgtcattgttgaattaaacccggattcttaatccaaaaatatgtcactggaacagccacttgaaaatggttaattgggaggtcgagatgtttttttctacttaatgataatattgtcaggatatttactgcagggaaatagtagacacgttcccagttcaaccaaaatgcatcacttacataaaaaaaaaaaaaaaagaacccccccttctgctttttgaaataaactagcatatgtagaagggtttatgaattttttagtagatctgaatgtgtagcctgatttacatttctgcattttcaagggatattatttaaaatgatgaccttagtttcagaatgactgcctcctgaagagaggagggtataaccgtgaacacacggagcaaaaatccttgtcgtgttggggcttctgttccagagaattctttttggtcccctgagcccaggcccacaaagaacccagaaagaaaagtctaggggtctctcatagaaagcttaatttagatttatttatttagatttattaatttagatttctttcggttccgcattttggccaatgaaggaaggaagcagagacaggtaaggtttctcagaggggctgggggactaagttcatggagaaggagggactgactcagggagagttttttatggtattagtcccttgagtcccatctgccacaggtcctgccttccgaagggctgagctctcacttctgtcctagcttttcttagctagaacagaacagtctccataacttcagagccacttgagcagttcctggaaggactcaccgaagggggctgaacaaagcctgtgaacacagacaggtgtcttcactttcaggacatcgtggagcctttcctgtgccaaagtgcgttgtcagtctgcaggcttggaaccgtttttctcagaatgtaccagaatgctttttcacagctgagagagatgcttcaggggtccaggctgagtgctcttcagtgtgtctccggggattagaggctcttcacctccttttttaaaaaaatttttttaacgtttatttatttttgagacagagagagacagagcatgaatggggagggtcagagagggggagacgcagaatctgaaacaggctccgggctctgagctgtcagcacagagcccgacgcagggcttgaactcacggaccgtgagatcacgacctgagctgaagtcgaccgcttaaccgactgagccgcccaggcgcccctcacctcctttctaaattctttcatcgttttcttgttcaaatctggatgcctttggatttaataataagtacgatccacggatggcacttcgggtctgactcagtgcctttcagccactgacaggtgttctgtgagttatcccactcctgttcctgtaggtggcctgggtgaggggacagcacgctggcttcatctgatttttttgcatcttagcctgagagtggcctttcagagatccatggtatgataagctctccggtttcaaatcaagcactgtcccggtgaggtttgaccctggtgaattactgaggaccgtaaagttcttctgtcgattcttgggcatccggtaggactcttgttgcctttggcgttgttagtgttgatcctcaggaaggaatccaggatacagtctgcctagtgatggaaagtggtactcccttgagttataagggcaagaaggtatccccactgaccacagctttggtagaagcccataaggattcctcaggtgcttggtaggatgtcacctaacaattttgatgaaacacccctgcttcaggaatacaagcgtgggtacttaagtaattaggagatcagttgctgtaatatgcttgctctggggtgacaagactagtgtttgcgaacccagtgtagtcatcattggttagtactgactgttccgggtgagaatttcagggcctagtttatttatttattttttaacgtttatttatttttgagacagagagagacagagcatgaacaggggaggggcagaaagagagggagacacagaatcggaaacaggctgcaggctctgagctgtcagcacagagcccgatgcagggctcgaactcacggatcatgagatcatgacctgagccgaagtcggatgcttaaccgaccaagccacccaggcgctccttcagggcctagtttaaatagaacctgtttaagtttgcaatcagttaactagagaaggatttaaaaaaaaaaaaaaaaagcagggggcctatgacttagatgaattccttggattgtttgaaaacccagtggtagccattttaagatggaacaatccaacctcacgttaactttaaaataagtatatatatggggcacctgggtggctcagtcggttgggcagccaacttgggctcagggcatgatcttgcggttagtgagttcgagccccacatcaggctctgtgctgacagctcagagcctggagcctgcttcggattctgtgtctcgctctctctctgctcctcccctgcttgcactctgtcttgctctctctctaaaaaataaatacacattaaaaaaaataaaatatatatgtataaataaattatggggacatttgagacatagctaatagtgtaacaaactttcatatgcctgtcatccagcttcaacagctggatcaacaactagtctttttgctttatctccgtccatctcatcctgccattattctgaagcatatctcaggccttgcggaatttcgcctacaaatgttttcagcatgtagttctaaggtacaaagattcccttcccctaaaagtaatggtaatgccagtgtcacagccttccaagtcagtataattccacaatgttgttgatgatccagcattcacatttcccctactgaaatatgatacatataaagatctatgcaaataacgtcaacgtttgatagaacccaaacaagattcacatattgcagttggttgatgtggcctttcagtcatttcttatttattatagatcctagtcccccatttttgttgaagaaacggagtgcttgccctatgcaatttttcagtctctcatgtggtcaacatgctgtctgttccctgtatttcctgtaaatttatgatatagaggtttgatcatattcatatcgaacccacaaatcgtgagatcatgacctgagccgaagtcgggtgcttaaccaactgaaccacccaggcacccctgtactgatacctttcatataatacccttgttttgctctttcgggtatggggtggggtggaggttattctctcttggtttcctgctgtgagtaacatttaaattatctagaagcctgttctttcctctcccttttctccccctagcttggcatctgaagtaatattctttcaccccggttactatctgtacaatcagcaagcatatgctacttttcagatagtcctccctcccctaattttgctgacagctgtactgaaattgctttatcataatacatagcaatcctaccttctatttcctttgttaccactctttgttctactggtaaataaatgtatgtttgatcctggccactggtccttatgtcctgtcttccctggcactttggttttctgaagctcatctttcactagatgcctcaggaagcactcctgggaagtatttcctgaattctatgttcataacagcttgtctgtcgcttttatacttcagagtcaggttggctgatataaaatccttggctcatctttctttgctcaagtatctttaatattttacggtagcgtcttttgccataaagtgttgtcaaagtctgctgacaatctgattttctttccctcatgtttcacttggtatgtttgccgagatatccaaaggagtgtattttacttttgttctttgaggcccagaagtattttacagtgttgggtgctttgcattgatttttctagggacacggtgcaccacttaaatatgtacttacccagggaagttttcttggggcaaagcttttgctatttattctattcttttccattggctttaggaacccccattatgtgtatgttagatcttctttgcctgtcttctatgttaatcactttctcctaaagccttttagtgtcttcatgattcgtgtaaatgtaagaatttcgttcctctccatattctggttaaggcagtattcattttatttgttcttgtgcttttttttttttaaatttacccttcatttctgattttttttttcttttacttctaattcttctcttagttctttacctccagtttcaaatcttccattttctccaatcaagtcattttggggttttaaaaatcctggtttgtatggttctttatagcttctttgatctcatgtatttcagcttagtttgaaactgctgggttatagttttcatctgttctctttccttctggcatgatttttattgtctatactagggaagtcattctgtgccttgttgtgtctttaactatttggaattccgctgtggttcttttctgttgttcaccatgagttttcctgtatttcctgtagcatttctggcttcacaattctagagtaccacttacgctgttttcaaggagtggtctacttttctaaagtctaaggtcttacatttttggtccccattcccacctgcccaccccaacctttgcccctgcttttgctcatcttagattcatccccagcagtttctcctctctatgaagctttctcctttcttgttaattcataagaatcagatgtcccccaccccagaacattccaggacattagacactacgtgggtcacaattccctctgcacttactggtgaaattggacctcgcaaagccctttgccactttgtgtgggtgttctcagaatggctctctgaacattctagtgacctctaatggcaattcttgaagctgttggttggttgtcctcaccttcacgtatacagggaataccttgtctcctggttttgttgtcaacgctgtccctaggtttctggttctgctctgtttgtctgtttttatggttagtatgggtgtgggtgggggagattcagtaattatggtgccgtcactgcagcacctttgccagaatctccgtagactttctttttttaagtttatttatttttagagagagagggatggtacaagcaggggagaggcagagagagagagagagagggtgagagagagaattccaagcaggctctgtgctgtcagcaaggagcctgatgcggggctcgaactcacagaccgtgaaattgtgacctgagctgaaacccagagtcaaatgcttaactgattgagccccccaggcgcccctctctgtagactttttttttttaatgtttatttgtctttgagacagagagagagcatgaacgggggagggtcagagagagaggaagacacagaatctgaaacaggctccaggctctgagcggtcagcacagagcccgatgcggggctcgaactcacggaccgcgagatcatgacctgagccgaagtcggacgcttaaccgactgagccacccaggcaccccatccgtagactttttaacatgagatttggtaaccttgctgtctaccaaactgggaccaaagtagcaaagccttgaaacattacatcatcatcggtagctgactttataaatcattttcttccaaaataagttactaaaaatgtgttgcagagagaaaagttagtggttgtaactatccgaaagactggactgaacattttatggtctacctagcattagctttctaaacttattgtttatgacaaaatgtaatggttgaagttatcagactaccaggaagctcgtatctgagctattgtttctgaggaaaatgtataaaaagtgacagactctgccattgtttgctgtaatattccttgagttctaaaggagatcatgctattttatggttttaagagcattagaccacatttaaacttttaatatcgtctaataaagataaaatcattagttaattaggtgcatttttcactgtcggctttttttccccccatgaaaaatttgcatatctctaattatagtcatttgaaaaaaatgctaccaggacttgacataatattaatttagatttccagaaatactaaatatccttcctccaatgtgagtttccttcaattggctgttgatttaaatgatatgctaaaaggtgatgatttcagaattggcctctccctccacccacctttttaaaggagtcattattctaaagtcatataaggaagaagtaaaagtttctcagtggacatgttggaaacttaaaaaacaaattctggaaaacgggtgcctgggttggctcagttggttaagcgtccagctcttggtttcagctcaggtcatgatctcatggtttttgagttcgagccccacatcaggctccatgctgacagtgtggagcttgcttgggattccctctccctctctctttgcccttcccctgctcgctctgtcgctctcaagataaataaataaacctaaaacatttttttttttaattctggaaaacaaagtaaagccattttcagacatttcctctaattttctacaaaaaagattgagaagaaatcattttgaaaacagagctggtcagtacgaattttttgcaaaaggatagcaggcctaatgtattgttctaagtgaatgtcacccaagaaaaattaagggaaaagtgaacgctcattaagcaaattgaccagcaagtgttctgatgaatctcgcaacaaatttgaatacactaattttgtccattactgtgcttttagaccaatgtgattgttttggtctaattattttgtattttgtttattcaaatgtagaatggttgcagaattttgcagcggttttctgattagcagtttagcaaattggtgaatggtgtatgtgagctcctcaccaagcgatgtctgttccgcgatagggctgtgtgcaagaacactgatcgtcttgggggaagcctgcactgctgtttgctctgctttccacccccctgcaaatgggagctcagaggcctgcgctggattagcctgggctgtgggcttgggctctgggccctcagatggagtgcaccagattgaggtctgatgtgctgcagaagttgtatttgccacccagtgtcactattctggagtcccgtagctgtgactggtgaattctgcaacatttcccacttctaaagcttggggattcgagaaatctgtgcccgagcggctgccaaagcttgtcagggggacccagcgcgaggccgatttctaggtgtaaaagccaggcagatttgctcactcaagaaaatctgttattgtacgtttgctttgacttccaatatacagatactggtaaaatttcttttcttttctttctttgttttttttcttttctttttttcttttcttttctttctttctttctttctttctttctttctttctttctctttctttctttttttcttttctttctctctctctctctctctttctttctttctttcctttctttctttcctctgctgcatgagtgctatgagtttcttctggtagctgaccgtcttgtggggttggggagtaactgcttctgtaagtgtggtcccggaccacagcaggggcatcacctgggacttctcagaaaggcagactccccgccctgccccagacttgctgaaaggggaaactcagagcagggccccgcggcccattttcacagctttctaggtgacgctggtataagctgaggtttgcacaccagtggtctagttttcgggcctgctgaaaggggaaactcagagcagggccccgcggcccattttcacagctttctaggtgacgctggtataagctgaggtttgcacaccagtggtctagttctcgggctttgtcacagcgtcaggcagtgataattgaaaagttaaagctcgtgtggccccttgaatgtcagaccagggtgcaattctcccttctctttctgttgcgcttaaaaagacagatatgaatttcggttagtccagacaggaaaacagacaattgcagtgccatgggctggggcctcagtagagactgcaaggggcctcagtagagactgcaaggggcctttagagcatgtgcatgtgctgggggagggaacgggaaggcccctttagaagtggtatttaacatttttttttatgtttatttattttagataagcatgagtgagcgagcacacggggcaggggtagagagagagagggggacagaggatctgaagcggcctctgagctgtcagcacagagcccgaagcagggctcgaactcacgaaccgaatggggagatcatgacctgagcccctcagacactaactgactgagacacccaggcgcccctagaggtagtgtttgaaaagtacttacccttctctgattaactcaggtagatcccactcagggcatccagtgtctcctttggatctctgttttgcacacagcatgcgcctcatgcttcaccgcagtgcttttttcactccttacaggtgtcctgctccttcgagctgcggcttctgcaggagccgcccctctgcccactgccaggggaccatgttgctccctggtctagtgcacttcaggtcgcaaccggcttgtttcttttgcaatccttttcgaccccccagggtgggtcaggtcagctcccacaggacagtgcgcctcgtcatattcatcacattgtaattatacaattgtataattattggttcattgttcattggtggagctaaatataaatgccatgagggggaaagaccttgcttattccctgctgcccaaggtcccagaagtggcaagcatttagtaaatatttttaggcgaatgaatgaatgaatgcatgcatgcatgcatgcatgcatgcatgaatagtggtggtggggggcgtcccctttttatccctgggtcatggggccggttaatgtatgcagttggagagagttgtcaccagaaagttttattcacgggagcagttgccatcgccatcaaatcctagtggcagaagggccagtcccttgcacggtggcagcagagtctcataagctgattctcatttgggggggtctagttttggggacacccaagagaagaggctcttgagagttattatccaggcatacgggaaaggagagaagtcctctgctcttggacacattcataatacatgtgccataaatcagcagctggagtggtcaaggtggcatctgagacgttttcagggaaatagctgttgtccccactccccttagagtgtccaagaggggctgcttgctttgcttacaggatctgatgctggggcactgtgtgtctcccacccacttccaaatccacttaatagaataacagaggtgccctcctttgccttattattatttttttaattaaaaaagattttttttaacgtttatttatttttgagacagagagagacagagcatgaatgggagagggtcagagagagaggaagacacagaatctgaaacaggctccaggctctgagccgtcagcacagagcctgacgcggggctcgaactcacagaccgcgagatcatgacctgagctgaagtcggacgcctaaccggctgagccacccaggggccccctttttaaatttttaatgtttatttatttttgagagagagacagggtgcgagagagagagagagggagacacagaatctgaagcaggctccagcacagagcctgacacagggttcaaacccgtgaaccacgagatcatggcctgagctgaagtcggatgctcaaccgacggagccacccaggcgtcccctcctttgccttattttagcctgtttgtcttgacctggataaagtagagtttttcatttctgttccagaaggagaaagcatggcatttacttcccagaggcaacagcttcaaggtggggacatgtgtctcaaataagacactaagtgagctatgctgatactgtataggattgccaatagcatgcacgtgtttataaaactacatatattgagaatgagggctcagggttttgtgaagacacagttttcaagacgtagcgggtaaaggtgctgacatgcttatgggaatcttttaatagaactgatctgttgcctatttataaattagttgattgctgtggttttcttttctttttctttctttctttctttctttctttctttctttctttcttttcctttctttctttctttctttctttctttctttctttctttctttctttctttctttctttcacatttgagacacaacataccctctcatacttattgtaaaccccttttaggttaagtgagtgtaataaacgcaatatattttggaacaaaagtcataaacacaaatgcctgctcaaatagccacaatcagaagagctatgatctgtggagctggccaggaccgtggatggcgcacatggctgtaattttatgttttggtgcctgtgtcctttgtttaccagatgccattttccctcataactgcagtccatccatatcccccccacccgcgctttcctgcccatcctggagggatggatcccagcgtggctctaatgctttcttgggtactcccttatcctccttcgctgctgtcatgcacagtaattgtagcagtagtaaaagcaagaccgtttactgcagcaaggtacatgcaggatttggaggtgaaagaagaatcctgaaatattgtaccccctgctagagatgtgaaaaccgaggcttggaaaggtcaagtaacttcccccaagtctcacatagcttggattgcgatccgtggttctctgcctccgaaacgaacaccttttttcattcctgttgctttacttgctcacccaggctcagagaagcaccaccatttccaggctctgagcttgcttctagactttaaaacattgctaaataaagttacagaagttgcaagactggtacaaagagcccctggataccctttacctagactctctgatttgttaacatttcgacacttttatgttgtgtatatacgtactattgtttctgaaccgtttgagagtaagttgctactatgcaccccttcccttcccttcccttcccttcccctccttcccccctccctcccccgccaaactcatctgaaggagaccctgcctcctgtattttatgagagcacagaggccacccagaatgaattccttcttctgccctccacccaagtgtgatctttccccctttcctctagggtgggaccctgggccagggagggacactctgggcttttgccctcaaccttagtctgagctcttcaaattcaactcagaccccacaactcctctgccttcccggaaattggttctctctagcacctttaaaaaaaaaaaaggaatctcttctcggcaaggtaacacaaaggcaaataaaagggagctttctgaatgtttctacctattctgtaaaaggaggagagaggggattccccctctgcttgttatccaaagctgcagctaattcaagtctgtttgcaagacagttatcaatgctggtaacctttttttttcctggtaactgcctcagataaaattcccttttttaaaaaattaatacttttgtttttacttccttgggtataaaccagctctgtggcataaagtgacattttgaaagtggaaacagaaggagaaaaggttctgtctgctctgtgtatgggatggatgggaaggtacaatttcccttatctgatagatccattaaaagcaggatttacagggacgcctgggtggctcagtcggttaagcatctgacttcggctcaggtcatgatctcacggttcgtgagttcgagccccacgtccagctctgtgttgacagctcagagcctggagcctacttcagattctgtgtctccctctccctctgcccctccctcactcacactctgtctctctctctcaagaataaataaacataaattttttttttaaaaacaggatttaaaatttattcactagtcacatgtattgatttacccattatggtgaaaattagcttaaatgtctacttaagccaagcataatgcctagcattttttagaactagaaaatccgagcggtctttcaaaaaagacctttgaaggcaaggtttcaaagatgccttaggaaaacaacccacatgtcaggatgaatggatatatacagacggcctctgtgcatacaatggaatattactcagttttcaaaaggagattttgacacatgctacaacacggaaggaagagccttggagacattctgctgatataaacataaaagggccgatattttatggttccacatataggaggtttctggaatagcccattcatagagacagagagtagaatggtggtcgccaggggctatggggcaagtagcggtggaaggggcagtttccgttcagtgagtacaaagtttcaatgataaaaaaagttctggaggtgcccagtggtggtgtttgcacaacattgtaatgccaatcaagtgtaaaatgaaaaatggttaaaatggtaggttttatgtcctggatgttttgtctccatgaaaaccaagttgaaatgccccagttgcatagatttgtgtgtatatataaatacggacaagctggcccctcacttactggcattttatttgatgtcattagaattagatgctgtggaagtaggactagcgcttatggttggcatgtattattattaaagttttcatgtgctgtgcgcacaacctcatttcccctcctaaacctgggagttggcattttgaggaaatcttagttcccaggaggggtaaatgggatggtaattagttagcatgggtgcatcctgggtcctcaccggtaggcactgccacagccgcgcagggcaacactaatgtgagggtagctgatgcccgacaggtccttgtgcaaaatcttgcaaggatccggcctctgtctctggagcatgcagcctgaaggtgagccacacatggcactctgccttggtgcttggcaggacttggggtaacaccggcctctggctagtacggctgaccttccccaagctctttttgcttttttcactttgttcccaatccttctttaagttaaggaagttaaagttgaaagaggggcgcctgggtggcgcagtcggttgagcgtccgacttcagccaggtcacgatctcgcggtccgagagttcgagccccgcgtcaggctctgggctgtagcctcagatccttggaccctatttccgattctgtgtctccctctctctctgccccttccccgttcatgctctgtctctctctgtcccacaaataaataaacgttgaaaaaataaagttgaaagaagtcaagagctcctcctcccccaccccaagcttcacagatggtgagggtctcccggtggttattgtattcaaatccttaatgcttgttatcacgttcagatttcagtaagtgctttccagaactcagaaacacggaaatgtatgtatttacaacaggacctgtactgggctgctggggaaaaccccctggaaatgagaaagttcctcttttctgttgcagggatggatcctaatatattgtgcttgtcaaatccagaccttatctgattccccaaagactgacctcataatggcggagaagggtttcctctccctgtgtgtctttgtctgagatcaaaagaggaagtcctgcttcctcaaacattgggttgtatttttcttcgggacgagtgagtaggaaatctattaagtagtcccatgacagtttctgctgctggtgaggtatgcaaatctagaaggaatcttgcaaaataatcagcggagaagggtcctttcagtgttgagtgatactcacctctccacacctctgttcacattataagaagttaagagccagggatcagattccacatttaggcccttattctatgttcacacatgagttttgtttatttatttattttatattaaatataatttattgtcagagtggtttccatacaacacccagtgcgcatcccaacatgtgccctcctcagtgcccatcaccactttcccctctcccccaccaccccccatcaacccccagttcacacaggagttctaaaacaaagtgattagatactatttatatcctaagagaatcattgctattcattcttgccacaattagtcgagtaccttttatgtccagccactggatcttgacccttttgtggcctaagtacttgattacggatcctaaactccgagagcttttgatggcctctttataatttttcagaagaggaaactgaggcctagagaacctaagtgacttgcccaagatttcgaatccagaacttctgtattccctaccattacgtttttttcttcacacccttccctaactgctgaagaggaaaaaaaaaaggcagttatacattttatctaaagtagataaatattatttatcttagcagaaaccaaacaattaataattttgcttattccccccaacctgagaaaagctttgacagctgtcctgtctttaaaaggcatttattggaagcttgaatctttgctgctcggtcctctttgtaagtttcctgagaagaaggcagaatatttaacacctccttgatcttgggtctgctttgctcgaggtcgggggtgtgtgtgtggggggggttggcggaggggggggaggtcttctcctgccaccagatggcatgcttgtgaatcaagaagcagtagaatgaaggaattgaaggtacaggcacagagaagctcccagttgtaccaggttgaggaatctggggaggtgctttacagccgaggacgagatgtgccttctttcaccagggatcccaacaacagccatgagagcaagaaatgcaaggactgcagataaggtatgatcaacacaggtgattcagtagttctgggtttgtccaagcacgcaccttactggttctgtggttaaggcagaaaatggggggggctgacttggcccccaggaggaaaccactctccatggcagaggcaggaagggcctaaaccacaggtgaatccacctaggctgaaagcccacagaaaggtggtgggtgagaaggtagaatgggggggggggggggaatgcagcctgaccctgccttccgagagatgagcacccctgtttatggtgggacatccgtttctagcactggggagcctgatgaacctctcttccctggacgtccatgagaaggcaggacccacatgtggtaccactggcccctttgtacccctttcctggaaagagcaggtccaaagaaaaaagacctggaggggcacctgggtggctcagtgaagtgtccgactcttgattttggctcaggtcatgatctcatggttcgtgggattgagccctgcatggggctctgtgctgacagcacggagcctacttgagattcatattctctctctctctctctccctctctctctccctctctctctccctctctctctccctctctccctctctccctctctccctctctctctccctcccttcccctctcttgctctctccacccctcgcccccaataaacattaaaaaaaaaaaaaaaaaaaggaaaggacctggacaataagccttttcaccttggctttggtgccattgacccccacataaggctcctgcaccttatggccacattcatcagcccctgaggtcaggcagcaacagcccaggagcctgcggcaggtctgtactgaccttctctgccaatcactcctctctctgtccctgcttccttgtctttccttctttgttctcccgcctctgtggctccccttccccacattataactcagccctctaggagccgctgcctcccatgctgtcgagctccaagagtcctcctgcccccccccccccccgtggccccaaggttgccggccttcaacagcacgcgcagtcaaggttcctcttctcccacacccacgaccattggagattctggtgcaagttggcgtagggtgggactgggacgttggcgattctggcatgtggccaacgttgtaatgagtgatataggctaggatgtgtctgttagtgaccagtcttgtgtgctgataattgaggggctcgttctctgtccacttctggtcccccaccggctgcatgccctcagagattctggcatccatctagaaggtcctctacaccaccttatctggaatttcttggttctcctttaccaacctagccatgccatctctaccctactctagccaccttgtgtctgtcatctcctttttggcccctctgtgttcttcctccctggatgattctagggacccggctggttagcccccctcccccagtcacttgctgtgtgctggtgagtgtgtttgtggccctgacacagcaccccccccagccgtccccccagcaaacttcccggacattccagtgccacccactggtccaaatacttctaaatcttcttcctcctccaggctgtcagcaccgcatctccccatcacctaagccaaacacaggtgtcctgtcttcttcctctcgctttttcgatactcagatgcagcccaccccaggacctttactcacccatcaatactatcctttactgctccctctgaggtctgaccagcacacatcagtcgctccccgtcaggctggggtcacccccttcctgtgatgaagggggcctgtgatgatcccaaagggggccctgtgatgatcctgcccctcaggacctatggcctcacaccgtgatgttgcacacacacaccttcctagggtctgccatatttgctcctaatagacctttcccctcctctaccccggggcttggccaggtcacacagccaggtcacgctctttattctgagctttgggaatcctcttcttgccccgccccgtttcccttcttgctctgctggcttcattctaaggctctgtgttctcctgggccccagccccacccaggacaaatagtaggagctctagtaccatttcatcaatgaagaccctttcagaagtgcctgctttgttcccgtccctcgctgccactaatgactaaggctccggcttttgtttttctgcccattagttcccttctgtcaattagttcataatctttagaccaacgttgcaatatacttaaggagctgctgttttcaaaaacgatgctgcagtgaagtctgtgttattttacgattttaaaccgactttcaaacggctgatcgttttacaatggtgtattgctatggctggaaaccgtaaactgtctcaaatacggaaacaaattttgtataatcactgcaaatcctgtgcctggtgtagtaccaaggctgggcgtgcagatagagaatttctgtcatttttaagaactaagtacaaatgtgcactgtgccaagggattggttttgaggccatggccacaggaatatcgccgtggaagacctaagacagtgagattgtgtcaattacttgttatttatcttgtgtctaacctgagtagattttaataatgagctctatcccggtaagtgctttaatctcggaattacaaggtgaaagatacagctgaactctctcttacccagaaagtgctttggaaatagcagagttgtgaatctggcatcatgtgatccattaggaccgttctcaaacttgcccatggaggtgccgttgaaggttgggggcagtagggatttggatagtatgtttgggagtgtgtcgttgtaaggtggtttggtttctttgaaggctcgtgattttccacccgaaaagtgaatttattttactttctatttcatgatctgtcatataaaagaatgtataaaattatccgtccctgaaagaaattgacctgcaggaagactggttaaaaagcactctagatcagagacacgccgctgtgtaggatgatgtctccaattaccttccctgtccggcacctccacatttaatacatgtagtgatcccttcaccgtgcattttttgtcaccttctgtattcctggtgctctgtgaggctttgagcacagagagagatacagactttgctttgggttctgagagcttgtgtgggagtaaggtaggggcgaggtccttgtaggatgagcttttcctgactaccacacacaccttcacactctgagaactttgccttgcctttccttgaacacacatgtaaacagcgacacgtgccaatggacaaggtcttactggctcagccctcacggcccctgcctctggaacttttttcatggtgcttttggggagaacagtagctgctcccttggagtcctgggacatgtttatcacctttcagtatttttatctcattggtgttgggtttgtccccgaggtctccatcagcatctacttcactaccattgtaatagttatgcagtgttgaagcaaaagacttgggtacgtatggtagcttgaacccaacagtaaagtgggggccatgctgggatcccccgtggcatggcttccttcactctgggtgatccaggatgggtttacagtctccctgccactgggccagagcatttttataaggttcgtttggttttcactgagctcatgctcccgctccctcccgctttattctatttccagtatcatctacttgtttttaaagcctcatgggtgttgcgggcaattactaggatccttccaacttggttttcatccagtttattcctgtggggatacaaaagtatgtcagaaagagtaggatatacaaatcattagcccccccccccttttttcattacaaactgtggttaaatagtacttgaactaatgagtagttagactacaatggggctttgagctttgccttcgtagcgactcctcctgccctacttcctcaaaactagaataggcccctctacgtgggttttcctccctgccgttattttacctggttccttatatttgtgtccaaagaaaaggttttgaaatgacttccttacttttaaccccagctgtaaatccaggcttcgcagcttagacatctgtgaagggcgcaaagccctcgggaggatctttgagaataggtttgcagcaatggtgggaggggtccagccactgctggcgggcctggggagaaccttgtgctcaagcaagtggctctcacttacactgatcattgagaaccttctctagtagaagtgcaacctggactctcaattagtattttgttttattttattattattttttttgagagggggggcgcaagtgagcgaggggcacagagagaggagaggagaggaggggaggggaggaggaggggaggggaggaggagaggggaggggaggggaggggaggagaggggaggggaggagaggagaggagaggggaggggaggagcggagcggagctcacggggctcgtgttttacccaaagcggggctcaagctcaccgatgtgggattcgaactcacaaactgagatcatgacctgagccacccaggcaccctcaattagtcttttaattcaggtatgccttgaatattttcttttcacttaagaaagatgggcgaccgcattctttttggtggagaagcagaaccttgtctttgagttttggttgactttgagttcgggatgactggcgggggttctccgcatacaccacacccaagatgcaagcaaggtctgcggtttctaacttagtttccttaaatgtaatgctcgtgaaactgttaggatgcagatccacaccccccacccccaaccctgtttgtgacttggaggccctcctccaatcgtctcctattttagccacattgaatttgacactccctttagttgagccgcctttagagtgtttcttacttatcagagaatcaacagcccttccccctgcccccgcctccacatacatttcaattttcataacatgcacttaatttatatatataatacaccacaagccgaacttctgtaaacaggcttgagaagtagaccaagtgactctgatagcgtgagtaggagagcagaggtgcagaaaagaacctaatggtcttgagtgctcagagtctcctgggtaggagtccacatggtttttttttattttttattttttttatttaaaaaaaaaatttttttttttaacgtttatttatttttgagacagggagagacaaagcatgaacgggggacgggtagacagagagggagacacagaatctgaaacaggctccaggctctgagccatcagcccagagcccgacgtggggctcgaactcacggaccgcgagatcgtgacctggctgaagtcggacgcttaaccgactgcgccacccaggcgccccttttttattttttttaatgtttatttttgagaaagagacagagtgtgagtagggaaggagcagagagaggaagacacagaatccaaagcaggctccagactgagctgtcagcacagagcccgacgcggggctcgaactcacaagctatgagatcatgacctgagccgagataaggagtcggatgcttaaccgactgcaccacccaggcgccccaggagtccgcatcatttaaaacatacagcctattcaacccagaaggttaaaagaccttttatgaatgcctgctttgtgtaaggtcgtagagagatggtagtcaagatgctattcggaccctcaggcacaactgtgtggaatgagtaaaaatcatgacaacaattaattattttttttaatgatatgacttaaaacaaagtcagggggctcacagaggctgataccagtggtcagctaagaaagatccagggtagctgagaaggtttgaggcttcaccagccagggcctttaaagaattgttttgttttgtttttttttttttctgttttttttttttttaattttagacatttttcttattgtggtaaaatacacatgatataaaatgtaccatttttttaaattttttttttcaacgtttatttatttttgggacagagagagacagagcatgaacgggggaggggcagagagagagggagacacagaatcggaaacaggctccaggctctgagccatcagcccagagcctgacgaggggctcgaactcacggaccgcgagatcgtgacctggctgaagtcggacgcttaaccgactgcaccacccaggcgccccataaaatgtaccattttttttaagtgtccaattcagtgccattcacattcacaatgttgcgccaccatcaccactatccgtgtccagaactttttttttctttttttatcattccaaatggaaattctgtacccattaaacccattaacgctccattccccatcccccggcccttggtagtctctattctactttctgtctctgaatttgcctactgtaggtacgtcatgtaatggaatcatacaacatttatccttttgtttctggcttgtctcacatagcatgatgtttgtggagttcatcgatgtggtaacaggtgtcagaatttccttttcatggctgaataatagtcccttgtgtgcacatactatattttgtctatctgttgatgggcacttgggttgtttctacgtcttggctgttgtaagtaatgctgctgtgaacatgtgtttgcaagtatctgtttgtatccctgctttcaattcttttgggtatggttgaattttacactagtgaaaggttattgaaggtatgttgccatttatcttttttttttttttttttttggcatttatcttgatagtgttaaagtcttgcaacattattgactatgatggcccagagccatcagtccctctagtagttggtccccacaatggtaggatttgccatttcttttttttggctcattaattaacatgtgttcagggaatagaaaacaactcataaattagccttagccaaacacaattaaggaagcacattttctaatgcaaagagtcctgatgtagataaaacccaattcaacaaacatttgttgagaacttgctatgtgccaaacactttcaataatgtgtgatttcagaacaatttcaaagctcagttggaataccttattggttttgaatttaaaatataataaaggcaggtagatgtgtatatacactttttttgaagtttattattattatttttttagtaatctctacacccgacatggggctcgaactcatagccctgggatcaagagacgcatgttcttccaacttgtcaggtgccccttgcaaacctttaacatgtatctctggtttttttctattgtgagaacattataataacattcaagatagtttggaaaaaagagaataaatgatacacagagtcccactgtaatataagctctattgtccttttacagggtgagttagagggttgaacttacaaattatgtattttgaaaataaaatccttaatgcttctggtggcaattattttaaaatttgttttttaaatctctagaaggaaagcctacagcagtgatctcaaatttggaggcttctttcttggaggtatctatagcagtttaatggatgagtggagccactcccctagtggagccgcagaaatgccatctgtcctcttttgggggtagatcggtgggctgttgacacctgttacaggggctgggtgtttaggaacctgtccttcctcggatctttcacatgttcagggatcgaagggaatgttttcatgactgtgccaggggaaaaaacacaatttaggattaggaggaggtaagacgtagacgtccatggaccacgtgtaagcatcagtacaaaccaaatgggtgatggggctggacatgttggacggatttagtgaggacaggtgatcatggggagggactaacacccatgaaaacagggctttccacgtggcgtgaaggtgatttgtggagttggtgtgttctggggacatgggcggaaagatggaccgaacaaggaatagagcggtttacaggctccttagccagccagcctaaggatctgtcttattggagaggcaggtaaaggtccggaggaagcagctataattagctattaaattataaagcacccatgaaaagtgctttgcaaaccatacatgatgtcagagttagctgctgcagcctctgttagggtttttgaggctgggagtggggttgttgagaggtggtgctttaggctgatagatctcagggttatgaggtttgaggagctgtgagtggggtggccggagccatggagatcttttaggagaggaggccgtctctctgtgagataataagtggccagtctgggggcgggacagcaggcgtggaaagacagacaaggaggagtggcagaaagattgctaggatttgctgccaaggaggcagaagtcaggcaggaacctgtttgggaaatgacggaaccatttacattcatagaaagtgaataagtcaggaccaattggaggagtgataagaagttctgttttgtttttttttttaattttttttttttaatgtttatttctgagacagagagagagcatgagtcagggaggggcaaagagagagggagacacagaatcagaagcaggctccaggctctgagctgtcagcacagagcctgacgcggggctcgaactcacagactgcaagatcatgacctgagctgaagtcggacgctcaaccgactgagccacccaggcaccccaagaggttctgtttttagaataatcgtgtcgaatatttactagtattgtctaggtgcccccagacggttctgagggctttatataatggccttatgaaataggttctgttactgtccctcctttgcaaatgagcaaactgagacccagttgatgaggaaccggcctaaggatcacacactgactaatggcagagccaggatggacatttagactgttttcagtccaaggtcttaccaggtatactttacggctttgctgtaatagccaatgtttattaaaggtgcccagtcctgtgttaagctccttacatgtatttgccgcatttgattcccataagaactctgagatgagggtattttttttttttttatcgttttccagatgtggaaacttgggcacagagaagttgagtggcctgccttaggtcacacagtgaggtttagcatacattggcatagtaggtctctggaagtcagcaatatttattcaactggattgtaatatctacatatacccttaagatccactcccgagaaaactgaattgatcgaaatatatggcaatacaaattctttaagaatttttggattaaatttactgtccacgtcactgctatttacttggaactactcccttttcaccacgggataaataagtgaagtgatagcgtcttcattattgttgtgcccattttcattatttagtgtgctgtataactttaaaaataatcccaagcactttgtttttatatcccgtctcctccatctagatgctgaggccagcaggtataggtggtcttggcctatagcacttcttatgttgttggtgcttaataacatttgatgattataattgaccttgttattaccgtctgcgaatccaagttgctgagtgtctttaatctggggtgtacttggcatgatctcttggagccgcaattgaagccatggttgaaaggtgcccggatgagatcgtttgtctggatgacaaattggaatcgagactggtcatctatgtgcacctgcggcagacagtttgagtgcttcttcggagcatctttggtccgtgcctctccacagactctcttccttctatgctcacatgttaagggatcccttctgtaacttttagcctcatttgactacagatctatttctctgccttctcttgctgcagcttctcagcaagaggtctacacttagactttaaccttggagcacgcagacactcccactcacctgaaattgtactctcagatttcctgtgatctctttcccaccaaatgcagggactttggttcatgcccttgaccttgctcagcacctgccttaggacccaccaccttttctttgaaaccgtctgatgtgttgccttccctcccctctttagcaactccccttcctttctggttgtgcctttttgttgtttttgttgtttgtttgagttttaaatcttagctgggagagctctccaagattggtactgtgtgttcctcttttttccacaatctcttacccttgactgtctgatcccgtcttttaaccccacatgttattgcagggctctcgcccctcctgcatccctttatgattctgtccccacctccccacccccaatcatgccaaacgtgtagagagtttcctggtgtggggtaggtatcccatttcgcccatgaccttgcagaagtgattgaaagcaccccagggagttctgttcccctgatgctctagcccacctcgtccagggactctttcttccatctccctcacccaggctgtaggtgagtctatcttttgtagctttcattgcactataaccattgatgtgtttttcctctggcgtacgcggcatccttagtctcaaatccttactgtaagtcttatcgcttctgcctacctgagaaccagggcttttcactgatttccttgactccaattgatctctagtatcttactctgcatgtcacctttctactgaaaaccgtatggtgcctctgcgcgtggtctctgtggtatatgtccatggcacgtgtctcgtctttggccttttctggcccagcccacctcctacttcttcagctttaaagctaaaactcggagctatgtttcacttattctgacatggaagcagtgtgttctgtaaactctggagtgtgtgtaagaaccacgtgttgcacttcacgtggacttttgcagatcacaattaatgcatttatgcccaaagcttttgcagatcgtaattcatgcatttatgcgacagatggatgaatgagttgactgctgcgaattttctaaggttcaagtttcatattcagagtctaaagtttgcatctttaaactaggacgcctgtctaggcattagtttgattaggctgcaacccgacaaatgtcgtgaaacctctcatggtctgatctttcaaatgggattttcattttctgccctattgcttggaactcataaatagttctccttttgatgaacatcaccatgtaaggagcactgcatacaaataacagttcacagccaagctgtgtcatgatcatgtacgttttgccacgagagtaacaggtcaggagtttttgtgtgtgtgtttttatagtgcgaggttttgtttttgttgtttctaggctgggtgtcagtaagtcagtaccacggcgacggcccctattcagagtggaaacttgacccagctggggtgtttagcccagagaaggccatggcatccagtgagttggttgcataccaagtgcgaccctctagttgagagttgcagaaaataattcagtagatgaacttaaactttaaacagaactctttctaactataaatagccgggcagctctgtcctatttttattgtagagcacacagaagatggaaatcaatatcggaagaaatgctttatttcgccaaggaaaaagatcatactcaacacgattctgactcttcttggcaggctcttctcaaccatctgcgagtccgggggaatggtctctaccgtccatccatccagcaacgtcagagttaatagtcagtgctggcgacgagattaggctgttgtgcaccgatccagggtttgtcaaatggacttttgagaccctgggccagtcgagtgagatcacacacaatgaatggatcacggagaaagcagaggccaccaacacgggcaattacacgtgcaccaacggaggcggcttaagcagttccatttacgtgtttgttagaggtaaacgtgtggctttctttcatgctatgctttggagaacttaagagcttgttcttaattatggatgacatatacatggccagccagagataaaatgttactggctgggtctagaaaacctaaaacaaattattcttagttagttcccccccccccccatcttttgacacatggtggctgtggttatgactccagctgaaggtctgcaaggctgtgatgctcttcctaatgaggttacaatatggtgagcccatttgttctggaagctctgagtaaaccctgagaataaattgggccctttgggaaagctgcattttaatgccttgagatcctagatactcccacttagtaaaaacacttcagggaactaaaggcctctaaaggcctaaacaggccaacacttcaaaagaattgatccacttttagggagcaaattccggaaaaatcacccagtcagctaatcaacccctgtccctcttaggttcttaatagttgtcagtggattcatgtaaaaaaaacaaacccaaaacccgaagaacagataaaacaaacaaactgtgacctcttagaagaaaaatatgatggttggatttctgtacctcatatcccatgacaacctccatgattcatctgtatttgtgcttttcacctccttctcaagaggaggtttgctgaaggggcgtaggcaggaggatcttcttgttgatgtaaaaacaagtacttaaagcttaagagatatacccaggttctagcaggacaaagagagtcccagttctggtcctgcgtctgtacctagactggggctaccattgaaagaggctgcgtaggaggcctcacccgtggttattgtggaggaataatgagtaaatttgtcctagatcgtagagcttcagggtttccattgcaaccttcagataagatcacctgctctgtcgtcctgatgtaattgtctttgaggagaccgcattgtgcaaattctagctctatcaagggttaatacagttgactcacctagtgttcactgtagagaaggttgccatgaaattcactctgcctctccttagtttatctgttattctttcctaggtgggtagttgaaaaatacacagtgataaggcgcagcttagcctctgggtatgattctgtaattgttgagctaacctgtgtgctgttctttgacattcaggaaggtactctttaattttcaggtgctaatgaagtatcattctgcacattaacgcaatgggtaaaccactaaataaatggggacgactgaattcgccaggtcggtctggcagatttcatggttttctttgaagggaaagtcttccctagtaacttagccctatgctgaattattactgatttaagatgtttggatacttaagtgattcatgttacagcaatgaaagaaattggggcgttgtaggagccagactaagccaccgagcaagagtagatgtacaaaaaataaaccaaacaaattagctatggcctcagaccatagttcagccatcatgaagtactttattcatagaactcattagtaaggctgggaggtgcataattcgttctggaaaattacctttcaaaattggtcagtatatatttcaatatgccaagttgatttttgtggaacacctgaattccaggtagaaaggacaagtaagaaacattttaaacataatctgttggcccaaccgtgtatctgtattctctttacacaggagaggtggcagcgtattgtgtatacagaatgaggtttgtctttgcttatatgaggtcccagtctgcctgaggcttttccagtccacacctggtgtcctggtgtaattgttaatagcactccccttcactcacaagcgtcctggtttggatgataaagtgtttgccaccgcattcctgaaactcatgagctccccttgggaatatggcttcagttgatttccacaagtttgtattaatatgcgtctttcaagagagtatggatagagcgggacccacgtgacattcgtatggggtggcctgctaatagttttcgcagattctatgcagaagccaaaagattctggagattggggactctggaagggggtccccacagaacagttaagaggaagaatacctctcctctctgatcctgataggtaatatcagaccagcttagtcttggctcatgctccttagagtatcctctgttgtggaaaaagagtaagttttgtaataaaatatccccagatttttaagagcccaagttgtggtatcagtcggactgcagttcgagttccgcccagccgtttctggaccatgtcactttaggagagtgtctttaaaaaaaaataatttttttttaatgtttatttgagagagagacagacagacagagtgcaaaggggatgggggagtaaagagagagggagacacagaatctaaagcaggctctaggctccgagctgtcagcacagacagcttgcacccacagaccacaagatcatgacctgagccgaagtcggacgcctaaccgactgagcctcccaggcgcccctaggagagtcacttttttgagacttcagtttcttcatgtataaaagggtgatgatgatagtgcccttcactgagggctgttttgagggttaaatgagagaaagcgtaatggtccaagcttggtgtctgacacatggaaagggacaaatgttaactgttacctaattagcagcatttgggtaaattctacttttgctcgcaaagagaaacgtcggagtcatttgagatttttcaaaaatgttttcaaccattcaaactactgatttttgacacgctatagatcccgcaaagcttttcctcgttgaccttcccttgtatgggaaagaagaccatgatacgctggtccgctgtcctctgacagacccagaggtgaccaattactccctccgggggtgcgaggggaagcctcttcccaaggacttgactttcgtcaccgatcccaaggctggcatcacaatcaggaatgtgaagcgcgagtaccatcggctgtgcctgcattgctctgcggaccggaagggcaagtccgtgctgtcgaagaaattcaccctgaaagtgagggcaggtaagggggggcccttctcgcgttcttctgggaggcggagcagctgttgatgttgattggtacacgacttctctcttctcgctggtccatctttcgatcggccgtcaggcagctggctcttcctcactcccgccggcttcagactactgtcagctgcttgtgaactctttgttgcatagtccccaccccacacaaccgcccacgactgcctccagcggggcgcgttgaccaacgactggcatttagaccctacagggggcagtaggaggaggggaccgccgtgaaacctaccgacatcggagcaccccaagttttgtcaccgcacgaggtgttccttccgagagaaactcactgggaagcttcagttacactatttgaaaagattagcatacacattattcactccttgatttagtattgacagagggattgactttctcctcggctgtttaattttcatgcattcccaaactcttcacaatctgaggaggcaagtaccaactgagtacagactttgttgttatcctggcgttatgtagattattttggtagctggaagatgtctagattttgtatctcagatcatcaaattcgacaccagttgacattcagcaactggggggctttttttaaggttttttgaaaaagtgtgctcattggcgttaaggaaagtttggttatttcaaatgggggttttcagagacggacaacgtattatttttacagcctatgggagagatgcctgttcggttgaaagaatttaactaggtgcgggtcacatcctcatgaaaccatccaaggttgtgtgaggtaaagattaatgccaggcctgcccgtttcaaaatagcattgtcaaggagcgttgtaatctcaaagcagacagtcctatctttttcacctggtattaatgaatttgcttgaaggatacaagatttaattgctgacgcctgctgatgtgcaagcactacagtcagtagcatacctgatattttatttaacaggccaccgaataagttgtgcgcatttgaggaaaagtggcaagtgaaaatggcatataatagaacagactatttgagggtcccatttctttttattctagccatcagagctgtcccagttgtgtctgtgtccaaagcaagccatcttcttagggaaggggaagaattctccgtgatgtgcttgataaaagatgtgtctagttccgtggactcgatgtggatcaaggaaaacaggcccggtgtaagtgcttgttccctccccccccccccccccatcgatggttttctctttgtgggagatgttaagggtttttttttttttttttttttttccttaaaagggtctattaattgtcctggggaggctcagctggtatgtctgtctgaggtgggactgtctgggcgtgagtcgagatgcagatttccccctttcgtgacaccatatgtgggtgtgtatcttcattattagtgacacatgcatgtcatttggtaaatttacgttgagaaaatcaaagagaggacttgagactccttttgttactgtacgctgtttctttgactttcctggggaaattttaagaaaactaatgattgcatattttcagactattatcaaagctatccagggcagattatttaaaatattgagcaaagttgtcaatggtttttttttcctttcacgttgaaaaagagtaaatggtctcagatgctaactagagagagctcttcgctttcccacaaagtggcctatccatttgagagctgggtttcttttttgtattgatctgactctcccctcggaggctggttacctgagatcaagttgctaatggttttctgtttgttttagtcactattaataaaatggttatctttaatctgaaacatttggacatgtttaagttctcattcatttaacaaatgcgtattgaatgtctactatatgtcaggtactgtgttaggcatgtcttaagtaaattttagccagttataggaagtttttttttttttttttcctctctaaatactccttaatagcaaggtctttaaaatgtctaaattcccaaatattttgttttcaaattcccgtcgactgaagtttcagtaatttttatttgcataatgttggccatctagttaactagcttttacggcggtttttcttcgtatacatatgtgcattacattggaggaaagatatatatagtttccttctcctcctcttcctgtcctccctccccttgctctgtattcaacattggtgatttcatgcctgtttaaagaatgctttgctagataagtaaccatggtgattggcgtaatgcaaagtagtatgatggtattcacatagacttgtgatggatgatcccttgctggtgaagcctatcaccactgagtaggagaatgcattgtactagacttgttctttcaaaccaatggctcagagaaacaagttttcgtttccgtatcatagaatttaataaaaacgatagtttatgtatggatttttgactgaccttatagaacgcaatcctatataaattggctttctataatccttgatttcagatgagagaacagtttataccatgtgtatatttgagcctccatacaacttgaaaattagcttttttttctatgaggaattatattgccccaggcagttttgttctgaaccgtttttccctggagtcctacatgccattcccaattaatccactggcattggaagataagcctttggtattgggagctctttggggaaatcccagtgtgcatctcaagggttaaggaaaaccaaatcacatgcaaacaatatgtaatatgtgacttgcagatggggctcatggctctccgccaaggttcatccatgaatcttttgttgatatcctttggcttaatttgaaatacttagcactcttagcactatcaaattattttaaaaatccatggcatttgactctgaccctttggaataactaactcacaatgaaatctaggataagatgactgtcctagagtttttgctgttgtgtgttttaaaacgtaagagagtcttggcgtttattcaacacttgtgaatcttggttagcttttctgatgcttttaaacccttgtatttttttacttttaattaggatatttgacagtgtcctaaaaatggtcttcaggtttgggtgttgggtctgcatcactactgaggtccaaggttttccttcccgcattgacatgttcattgttcagggtttaactccctgttagaagacctttgggctcttgggagaactagaaggaagagataccataaatctagaatgtgtgatgttacctgtccatcgtcactctgcctttgcagagaagtctatgacatgatggaccgggagaggacagaacaatgtcacctcaccttgctattgcatcttcttgattgatcttctgcagcaaaatggcagatttctgccaattactagaagaatctctgggaagggagtatcttcaaatctgcccagtgcttcaaattggaaaggcgtttcaagacctttctttaaagaccttctctccttccctttcagaaacaaaagctgggtgggacgcctgggtggcgcagttggttaagcgtcccacttctgctcaggtcacgatctcacagtctgtgacttcgagccccgcgtcgggctctgtgctgacagctcggagcctggagcctgcttcggattctgtgtctccctctctgaccctccccccgttcatgctctgtctctctctgtcttaaaaaaaaaaaaaaaagaaacaaaagctgggtgggacgcctgggtggcgcagttggttaagcgtcccacttctgctcaggtcacgatctcacagtctgtgacttcgagccccgcgtcgggctctgtgctgacagctcggagcctggagcctgcttcggattctgtgtctccctctctgaccctccccccgttcatgctctgtctctctctgtcttaaaaaaaaaaaaaaaaaaaaagaaacaaaagctatgactgctcgtatccttgacttgctcaagatctcacagttagttaacaaagcaggtttctcttctttttatttcaaaacattcagctttggcagtctgctcttatgtatgctcattttaatgtaaaatttttttttccaaaaatataataacatgaggaaaaaaagagaaacatataattctaccactgcatgtagcagtgctatgcagtggaaatataatgtgaacctcctatgtaatttaaaattgtctagtaggcacatgacagagagtaaaaaaagtaaaattgattgtaatatatttatttaaccttgtatagctaacatattaccatgtaattaacaaaaagtatcaatgggttattttacattacttttttgatattaagtcttccaaagcggggacatattttatatttacaacccaactcagtttggacctcaagcatttcaagagctccagtagtgtttatgttggctcgtttttttgtttgaaatttatttttatttatttattttaattgagagagagcatgtgggcagtggagggggtgggggtggggagagagggagagagggagggaggaagagaggaatcttaagcagtctctacactccccgcggagcccaacgtggagctcaatcccatgatccagggatcatgacctgagttgaaatcaaaagttggatgctgaacagactgtgtgactggtctttataaacactatatagcccacttttttttttttttttcatatttcttttctctctgcccccacgcatctgtattatcacatggttgccgttctaaggtacactcgatttaggtgttttaagtaatataaccatttttcttattttcacgttcatgattttgatctttggtagacatttaggtcatctctgagatttcactgcagtaaatatttttgagcttttttttttttttttttttttaattgagttatttccttgagataaatttgctgaaatcgatcaggggacatgaacatactgccaagctggtttccacaaggattgttctgatttacaatgccgtcagaatggtctaatgctaataggctcaccatggcctggccagcaaaaacccttgatctctctccatgtcagtatcagctcctttattttcttttttcagttgttattttttcaattggaatgtgttcatattacagaaaatttggaagatgaagaaagctctttggtactccttttaatcttttcagagaggagctatagtttatattttactttcttcccatgatattttccataccagaaatctctccatgtgtgaatggtgatatctcaagagtaaatttgtaactttttctcttcagctcatgcttaagtaatttgggtttggtcttacatgttttacatactttgggaccccctttttttttttaacgtttatttatttttgagacagagagagacagagcatgaatgggggagggtcagagagagggagacacagaatccgaaacagactccaggctctgagctgtcagcacagagcccgacgcggggctcgaactcacggaccgtgagatcatgacccgagccgaagtcggctgcttaaccgactgagccacccaggcgccccaatgggaccccttttaatagttgccaaaattctgctgggtaagaactgtaggatgaatttccaagctagctttagacattgggattctacttttattcatgaaaatagtataaatattaatagaacatgattattagagatgtgttttcttgcaatcgctaggatataaaattttaaaaaaatacatgtaacaggaaatactgatatgatctaactatgctgactcattgtaaaatagagtaaaatatcagcattgtaaaatgtggtatttcttatatagtaacttctaaaatttggcactgctaaacagatatttagtgctgcagagaatttggaatcaggtatgccatggttattaaaaaaatgaattttcatgttttttccaatagtgactatctttcaatataatccaggaatatgaagtgttccaatgacagacttgtcatgatgctttattattcttacttaagtagtgtataatgaatgttaatatggagaagttaattgctgctatttttaatttatctagctaggaaagatcctgaatataaattttatggtaatctttgatttttttttttccctctccttctgtaaccagcaaactaatgcacagccacagagtaatagctggcaccaaggtgacttcaactttgtacgtcaggaaaggttgacgatcagctcagcaagagttaacgattctggagtgttcatgtgttatgccaataatacttttggatcggcaaatgtcacaacaaccttggaagtcgtaggtaaatatctctatgcgaacgtataaattaccgacagtagtgaaagaagacgttgctagagagtttcctttttatgttaatagaatcttgaagcgattcttagaaattttatgatcacggaatgaatgaatgaatgaaaatgatcacggtagcctttttccaactagagcccaagagcagatcctaccagtttaatagaggggaagaggaaagatgtaactgaagttgtttcagtgggccattttctgccatccgccctcccctccccaccacacaaagtgtgaactggagctttttcaaaacttctggtccttgctgaatgacttgagtttggaagtgggtgtagaccttctctatggaggagagcaagtgctgagagcctacagtatttctctgcatcttttagggaggcgcctcagtctttggtttatcttttttaccgcccaggggtctggttcatttgttgcaggaagggctgaattgggctttttcttcctagtaggcccgtcacttcaccctgtcttgtagccttataggccgtagcataaaccttcaggaaggaaccccactggggttagttaggtccttggttctacctagcataaactggatcatggtacctatggtcctcagcgcatctagctagtacatactatgtaaaggtttaaccttttcttccctcctctggaaatctcaccaaatctttattttccaagatctacttaatgagggcagaatgcagtgaagtactgttcttgatttcctggaaataataataatttttaaattactttatttacactttttttttctttggtcttttgagtattgttcgaatttaatctattttcttgccttttagtgcagttatgttcttagagcttgactttgattaagtacttgcatggtggtgaaacttcctcatgagcaataataaagcgatgtgatacttgttttcatttctcctctttcccccctgtttcttcaataatttatgaagcaatgttagaggcctgtgatttattctacaataatctcatataattttggtgtttctgcccatgttgtaatggaaagcattacacactaaatgtggaaaagaccctttacttgcaattatagagtcagtgtgcagaaagagtattattactttttccctaaacgtgattgtgaaccatttattaatttgaatagaaagctatgcttttaaaatattaaactccataagtgctaatttgctaagttgattagggagcatgttgatagatcagcttcagctccagaaagcaattagtaaggatgttttgagcatattattgtatgtaatcagattttgaaaatccattcatcaatttccaagaatataactgtataactggaagggcttgtggctgtgaaatctgaatctggttttgtattgtttcgggatgggttgggatgggacaagaaagagggagacaaagagaaaagtcatttcttttggggctggaggtcggatttgaatatgatgtggatcccttcttggcctttcagctaagatcaagtgtgcatatgacgtgcagtggctttgggatagtccccacctggttttgaactggagctgtgccacctgacttttgaatgcaccctactttacctctgcctgcatttcctcttctgagaaacacagcctccaaccccaaaggctgcagagaggagaaaaggcaatagattttatagaagtgcctggcatagagtttgcacttgacgaaacgttaatgcgtcaccaacttcttaatggagacgtacctgaaaaagatcatactttctgttcaaacaacgccgatggagttctttgattctaataactcttatacttcatgaatttgaagctctattccactataggacataaaactatattgagcctgtaaagaactctagaaaactcaggaaaacttcggtagtatacacgtgtggtgataatgagagaactcacttcagtgcaattattgtctggaatatttgagtgttttgctttgggtgtgtttgaatggatgaccttaagaactggaaactgtaacatagcatttaggtgaaacatttgttccctcagaattaacctaaatttgctttaaaaatgacaggaggttttaatttatgatttaggtattagaacaagatggtggtttccatctccaactttgacttggatgagtttttattctcacctatgacagatccttttccattactgcaaaggagagttggactccactttttcttctgaatctataggaaagccaagaggcagccaatgctgtaatgacaactcctgggagaccttaatatatgtagccaaatagtgccaacaataatgaaaaatgtatttaaaagtttataattactaaatttggaaaaagaattagaagaatagtttttttttttcaacgttttttatttttatttttgggacagagagagacagggcatgaacgggggaggggcagagagagagggagacacagaatcggaaacaggctccaggctctgagccatcagcccagagcctgacgaggggctcgaactcacggaccgcgagatcgtgacctggctgaagtcggacgcttaaccgactgcgccacccaggcgccccaagaattagaagaataaaatgaaagctcttccataatcccactaaatgtgacataaccatttttaagatttggtatattgcttgtatttttgtatgcagcagggtttcagtgatgcatacaagcttattctctctctctaactggaagtattatatggagaatctagggatatgttacagtgagaaaagccaagcctggcgtctcacaaacctgtattcaaatctgggctctgcccttgggcagctagcccttaagctttccaggactgggtatctttcatctatacattaggagttataagctttctcccctagtattgttatggaattaaatatttgtcataattgttaattaaaatgtaatgccaagctacttaaggcagttcttggcacatagcaagcattccataaatggtggctataaaaataatattggcaattattttattacgtgtttttcaagctctttcttgtgtgattgtcatagaaccgtttctaatcagtgccctgatttttaaaattattatatccaaggtagagggccgttctttttgcatgtagctacccactaagaagagttctccaacggaaattacagggttaaattggagaatagataattatagaaaatctatattgctaaatgctttctgaaagagttgtgccaatttacagtgtgtaattcagcacgctacttttaccacacttggagaattattgagtttctttcaaattagttttgctatttttccataggatggatagactttattttttaacagctttattgaagttttgctatttttaagaagtgaaaagtgatgccttatttttaattaccagtttaggggtgcctgggtggcttagtcggttgagtgtccaactcttcttgattttggcttgggttgtgagatcgagccccatgttgggctccatgctgagtgtggagactgcttgggattctctctctctctctctctctcctctctctctctctctcctctctctctctcctctctctctctctctctctctcctctctctctctcctctctctctctctctcccccccccctcccttcccccccaccctattgggctctttctcaaattaaaaattgatttactagtttaaatattttccatctattgattttcatgttctttttcctattaccttaattttacagtatagacatttaaaattgctatgtattcagattcttaggacttttcatgatttgattttgttccttctgttgttttttttttttttttttttttttttaatgttaatttatttctgagagggagagagacagagcgtgagcaggggaggggcagagagagagtgagacaaagaattcaaagcaggctccaggctctgagctgttagcacagagcctgatggagctcgaactcaggaaccacgagatcatgacctgagctgaagttggatgtttaaccgactgagccacccaggctcccctcttctgttgtttctaaaacgtctagaaaactgccccctctgtagaagtttgataggagttaattctgttgtcagttaaagatacagtttgattattaaaatgctgtacttggggcacctgggtggctcagtcggttaagcgtccgacttcagctcaggtcatgatctcacggtccgtgagttcgagccccgcatcaggctctgtgctgacagctcagagcctggagcctgcttccgattctgtgtctccctctctctctggccctcccccattcatgctctgtctctctctgtctcaaaaataaataaacattaaaaaaaatttttttttaaataaaatgctgtacttgatttcctctgtgatatattacatgatgaggaggtaacaggtttatttttcttcaaatactaaatggcgttctttcaacacctttattgacaatttgagctctcttccccctcttgacttttgacaccttcttatcacatatacaattgtactgggtctgggtgtgggctaaccatttagtcccaacactttctaacctaagaagtagttctagaagacttacagggtggtgctagctcttgaagagagttccttaagagacagagaaggctggggcgcctggttggcgcagtcggttgggcgtccgacttcagccaggtcacgatctcacggtccgtgagttcgagccccgcgtcaggctctgggctgatggctcggagcctggagcctgtttccgattctgtgtctccctctctctctgcccctcccccgttcatgctctgtctctctctgtcccaaaaatataaataaacgttgaaaaaaaaaaaaaaaagagagacagagaagggagaataaacatttcaagcgcgtcctttctgaaaccagccagttatttttgtaagccaaaggtgaagttgggttttccgttggatggctgtggataatagtttcttcctgttctattttgttataatcagctaaaggattcattaacatcttccctatgatgaataccacaatattcgtgaatgatggcgagaatgtggatctgattgtcgaatatgaggcatatcccaagcctgagcaccaacggtgggtctatatgaacagaaccctcactgataaatgggaagattatcccaagtctgacaacgaaagtaatatcaggtaagaaaaaagccttacgctgaggatcagatgttttccctgtctctccttggcttaccagggcctgtgtctgtgacccatagatgtatgagaagtcacctcatgtggaaagaagtttgggcctgcttcctgagtctttagaccagtatttcctttcgctttgtgattagagcatgcacggaagtctgtgcctcagttttctcatttgtgaaatggaagattgtttgctcccagagttctgaggctagttccgagcagtgactggcatgtgctagagacacattgaaatcttttttttttttccacagaaagaggagagttagtgccttgaatcctttttttaaaaatgtaaggtaactaaagcctcattcggtagctctgggccaggtagtgaacccaagttctgtcataacacacacccctctcatttgatcctcaacagatttatgatgaaaatagaagcgatcataaaatagtaacaagtagaagaaaactagtaaagaaaaataaataacaataaaagtgattttaaaaattaaaagagtaaactaggcaaagtagcttccttcttgtaagctgcaggtgcttttgactgtgctgcactaagtacctgacgtatagtgagtcaataattttagtcctccacaagacccatgatcaggcactcttattttcatcatttctgtagaagaggaaacagacacaaatgagttaagtaacttgaccgagatcaaaatggctaccagaggtagatgcccacttagactttgtatttttttccagtcagaaactatgggctgtaacagcaatgtgggtgagagatgatgttgtcctgggccaagatggaagggtgggaaggaagggaatggatttgggaggcatccaggccacctccacaggaatactcagtggttgagggggtgggagagagaggtagctgctgaagatgtcccttcggatcctgtgtccatcagccactttggatggcgaggggtgatgccattcaaggaggaggaaaggttggcaggggcaaatactgtgagttcggcttggtgtttgttgaaattgaggttgaccatgggctctctagtagagatgttcaggtaggaagtatcctaggtcaggttccctcgaagcagagcctgagacagggattctgggtcaagggcttcattaaggggaagagatacctcccagggagtaggagagcggggcggggaggatagaggaggaaaaaaaggatatgggtgagcagtaggctgatctcaggggtcctctggagctggctttttgtccctctctacgggcggtcactcattgctgtagacctggatcagcagtcaactttcaagtgggcctaagtgtccaagggcaagacttgggaggacgtcacaggtgtgagtcatcattggctatacccacagggcaggggttgggggcttgaaaatagctctgtagaggaggcgtaggactgagaagtctgaactggaggtaaagatttgaaagttgtgagcaaacagtgggtagtttggtgcgagagtagattgctcagggtcacgtcaagacggttgtgtccagggcttctggcagaactccacactctgtctacatagccatatctgccggccctgccataaaagagaagcttcaatggcaagtactacgaaggactctaggaagaggtgctgggcatgggaggaaaaccaggagattacggagttgcaagaaggaaggtgagggcccacggtgtcgactttgctctctgcatggagacaactccgtgtagatgcctgccaggcttgggtccttccaggtgagtgttgtgaaagcacagcggggcaggtgagctcaggacaccggtggggaggagactgagtgaaggaccgtgggcagagagggaccacagacaagaggccagccagggaccgggaggaggctgcattgcctctccccactcagcaccctcactgggcagccattttgtcccaaggtaaatataggtgtgtatgtttatatttgctaatgtggatcttgttaatactgagttaagtgagtcttatttttcctcaaacaggtgtgtatttccagacagaaatggtggataagacactcacttgaggcaggcccttcacaagtgattgatttattgcctttttttttttccctgtgtgtgtgtgtgtgtgtagatatgtgagtgaacttcatctaaccagattaaaagggaacgaaggaggcacttacacgtttcaagtgtccaattccgatgtcaattcttccgtgacattgaatgtttacgtgaacagtgagtaaaacaaacgggtccttatctttttattttttattattttaagttgtggctcgtgttggtaacagctgcagaactgagctcattgtgtgctgtgtaaataatgtttcatgataattttgaccttaacaaagaccccgtggtttggtggttggaagaatgtgtacgaaagccaattccttgccctacatctcgctgaccgcacgaccttgtggagggcgctcagattctgggttccgcctttgaggcaaacagaggagccctagaagttaaaaataactgtcgcttgggggaaaacgtattattattgattgttgaattggggaggcagaggttgaatgagacctggattatggtgttagttaggtaagagatgctatcaagctctgacatgatttctttgtgacagtgctttctttttcggagttgtgagattatttgtgttttgattgttctcctactaagacgaaggcaatatcgatccagctccataggactctcctgcgtagcacatgggtactaaggagaggaagcaggtggtttaggatgggaggctggctttggacatgggaaccggaacacctgagtcctgccccgctgtggcccccacaacatcttggagaaatgtctttgcccagaggttgaggccaagggagcatgctcaccagctggggcttctgctgtgtgctgggcttttcccctggctctactctgggggcctatctgcatttccaaggaaagatagcaggtgcctgccataccgcaccagccagggcaccagggcacaggagggctccaaagacacagaattccaaggagtggccaacaaaatgacccatccgaattagccgtcctggatgtgtgttggtggggtggggggtgcgggggggataagaagacaacccggaacattccctaggagacaacttagtcactgtgctgggcacttcctgtatgctggtgagaacaaagaatgggcgccggtttcttgtcctgaaggagcttgcctgctcagaagtgagtttacaagttcattgatgctgaagctccgcggtatgcggcaggtagcatgatccatttcaagggtagacaggaaatagctagtaagtgccatttagggcaggtttttgattgctcttctggagtcttttaactagaccttcatttccaagcacaagatgttcttacgtgtttacatcaagagcgtcacgtctgtggagctaaacaagtttctgaactacaggccttctcaggatccttactgtgctggtgtgtgttatgcctccccaggagggcgggtagatgctgtgtgcagcccaagcttgtttgaccacagaacttgcctcttttttggaggaaatcgtgttaacatctcagttcctctgaacagctttgattatctggtatctcattggcctgcattccagacatctccagatcaattcaggtgttaatcagaggagtttagcatattacacacgggcaaaatgatctgcttctgcaaaatctcaatattcgggtaatttaagagacggttgcaggtaaatcaatatccttacaggctaatatgcacattgtccacacaaaacccaatttttgggtgttctggtgcagtgtttcccaactatctgtggtaaaggacctttccttttttttttttccagtttattctggcccagtactttctataaaatacagtaagagccaggatgcctgggtggctcagtcggttaagcatccgacttcagctcaggtcatgatctcatggttcatggatttgagccccgtgtagggctctctgctgccagtgcagagcccatttcggatcctctgtccctcctctctctctctctctctctctgctcctcccctgctggttctctctctctctctctctctctctctctcctctctctctctctctctcaaaataaagaaacttaaaaaaaatatggtaagagccagtcactaggaaagtgaaatgaaaaagaacagacatatgcaaaacccacgtttgatttttttaaattgtgagatccaatagatagaaaaattactctgtcagattgctccttgtaaatgcttattatcaggttgtgtacttaactcttgttgaccaggaacagcggatcatggccatggcctgccccacagacctcactttgagaagctcagtagttgggaattttataaaatgaagcgcattttgcgtctctctttccctggcttcaaggtcaaggagacattgagatctgtctctttccccttttccatgcttccatttgctagtctggtctgccggttagccgtgagtcattgaccttagaaagatgtccccgaagtcacccttacttttctctggtgacaaaattgctgccattttacttaccaggctaatttgccatccagcaggatcagtgttagtcacctctgctggtgaactcatgcttgttttgaaactggatgagaaacggcattaagcttctcaaatgaattttttctcggattccccgttggtgcagaaggccttttgtttctgctggggcctgggtcacagacatgcacctaacatttcctgagcttctgcttcatgacactgggcacacagacaagagtgttgtctgaccccgtgggttaaggttcttcaagaaatctttcattgatgtcagttcattacaaacacttaactaacagtggccatttcttttcactgaccttccacattggatttccttatctcccagttctttgacagaggtagtatttgtttttaagtttatttattttgagagagagagagtgtgtgtgtgagcaggggaggggccaagagagagggagagagagagaatcccaagcaagtcccacactgtcagcagggctcgatcccacaaactaccagattatgacctgagccaaaatcaagagtcgggcgcttaaccaaccgagccactcagctgcccctgacagaggtagtatctttgtgtgaaactcaaaaacatcagacctctggtgaagtatgttcggttgctgttcacagatcaagttagctaatttctttgttgatttttttcttctttgaaaaagatttttttaatgtgaaattttaaaggcaaacgctaaaaatagttttgaaagtttaaattggagagttgtgtccattttgacataacactttagctgagccaaatccatatgaagatctactgtgtgatttattctgtaaataagcttagccccaaggatgaaaggaattgtgctctgcaaaaattagaattgatagaaattagaataataaatgcatgatattagtgcagaaattcagtgacttttactcagtggcattaatgtgtaattgcgtaatagattcagctgaaatgcttatgaaaatccatgattttgaatggttcaatgtttgatggttgaaaaattcacttgttttaaaaactccacatgtagatttgagtaccctgagtgtgtgcatgtgtgtatgttttaattgcttatgtgggaggctttaaaaaataccatgttctgtcagtttgtgttagagaaaaatatgtagcatattaaatttgaaaatgttttaagtctgtttttaacttctctaaccaagccatgatttacatgggtctgttctgttgaatgttggctctgtggtattaaaagtggtttataacggccaggcaagagctataacatgtttgccatttttgagcagaacttccagtggaaactgatgggagttttcgctgagacaacagaagaggggcgcctgggtggctcagtcggttaagcctctgacttcggttcaggtcatgatctcgccttttgtgagctcaggccccacatcaggctctgcagtacagggtctgcttgggattctgtctttccctctctctgccccttccccacttgtgcgctctctctctgtctgtctcaaaataaataaataaacttaaaacacacacacacacacacacacacacacacacgaaaagccggtgactctttgcattgaatttgcattactataatcaccctttaactgcttattgaagatgcatacagaaatcagattcttagttctctaaagaagtttgatatcttgggtgagttaaatgtccgtttgtttcctttgtcgattaaaattgagaggaaagtagcattctaaaatgtatagaactatccaaacgtgttttcttatatatatacgtatatgtatatatatatacgtgtatgtatatatacgtgtatgtatatatacgtgtatgtatatatacgtgtatgtatatatatatatatatatatatgaagagaaagcacatatatatatatatacacatacaaaaaagagaaagcactttattatgtcattgtattcagatacagtgacataataaagtgctttctcttttttttaagtttatttattttgagagaggagagagcgggggtcggggggtggagagagagagagagagagagagaggagagagagagagagagaaagagagagagagagagagagagagagagagaatcctaagcaggctccgtgctgtcaatgcagagcccaacacggaacttgatctcatgaaccacgagatcatgacctgagccaaaattaagagttggatgcttaactgactgaaccacccaggtgccccaaaagtgatttcttatttttttttaattttttcaacatttatttatttttgagagagagagagagtgtgtgtgagcagggaggggtagagagagaggaagacacagaatctgaagcagtctccaggctctgtgctgtcagcacagagccagacgtggggctcgaactcacggactgagccgaggtcggatgtttaaccactgagccacccaggtgccccccaaaagtgcttttttaataggtactactctttccaaaattcctggaggtataagaaagatgacaccactgagattctatacatggcctgtgatactccattggaaacttctggtctccttgcctacaataaatgtgacacggtaaggtttttaccagatccagcacaaataaaaggccaaatgtacatttaactctaaattatccacttctcttttctgtcaccacccaatatccttgaatatttcgaaccttatagcagacttaagtgttaatcagtaatgtacatattttttacgtttattttggcatacactttcaaatatcccagttgagtcctgaagtaacctacacaactgtggaaagaaagtatgactgatatgatcatcagttatgatatgtatcagttatgatcatatcagttatgatatgtatcagttgtgatcatatcagttatgatatgatcatatgatcagcagttggttttcaaacctctggaatgattttaagaaggtccagtaactttttttccagctttattgaggcatcattgacaaaattgtaagatattcaaagtgtatatatgatgattttgatgaatgtaaacattttgagaagattcccctatccacttaattaacatattcatccccttacatatttaccctttttattttcggttttctggattttgggggtggggggagggtaatttgtttggttttttggtgagaacattgaagttctactttcttgacaaattttgattatatgatacggtgttgtcaactatgatcaccatataactcgttagattctcagaccttattcatcttatacctgaccctttgtactcctttaatacttcttcctaattccttcatcccttaggccctgacaacccttttgctactcttttttgatgaacttcatttttgtttaaagactccatttaagtgatcccgtgcaatatttgtctttccatgtctgacttatttcatataatacaatgccctctgggtttatccatgttgtcacagatggcaggatttccttcttttttaaggctgagtaatattcctgtgtgtggggtacacgttttatttgtccatttatccactggcgtggatccactgagcactggagtgcagatgtctcttgaaggtaatggttttgtttttttgggatatatatataccaagaagtgggattgctggatcttatggtagttctatttatttatttatttatttatttatttatttatttatttatttatttattttgtttttatatttatttatttttgagagacagagacagagctcaagtgggggaggggcagagagagagggagacacagaatcggaagcaggctccaggctctgagccatcagcccagagcctgatacggggctccaacccacgaacagtgagatcatgacctgagccgaagtcggacacccaaccgactgcgccacccaggcacccctggtagttctatttttaatgtcttagggaacctccatgctgttttccagagtggctgcaccagtttgcattcccaccagcagtgtgtgaggcttcccttgtctccatgcccttgtcaacatttgttatctcttctctttttgacaatagatgtgctaaccgtttgagtgagactttcattttggttttgatatgccagtaaccttcaaatgcctctttagcacattatctgatgacatttctggaccagcattatgattctaaaatgtgtggtaaatgatatctaggggccataaatagatctctctccagtcttaaaggtctcccctttcaggacaaacctagccagtggagccagagtactgtggtactcaggtggaggtaaagtaaggcagacaggacaagtgagatatggagaactctggggcttacccttcaccagtgggcatatgtggaacacgtggaaagttaagctagattggctatccaaatgaccgccaaactgtaccaagtcaactctcagagtttccaactctacattatttacagcagagtgttaacggggcttgaaacaatttaaggaaatgctaaataatgcattattttcacatcaccgtatcatgtaattaacatcctgtctggcatgagcaattatttatagatcatacagtgtacctgtatcagtcaaagtagtaaatcatctggaataaggcctcttgaagagaaagtttctctttgaccacatttgcaaaatctgggctgccttttatgtgtttttggttatagtttttaaaattttttttaatgtttgtttatttttgagacgtagagtgtgagtgagggaggggcagagagagagggagacacagaatccgaagcaggctccaggctctgagctgtcagcacagagcccgatgcggggctcgaactcctgaaccgcgagatcgtgaccggagcctaagttggacgctcaaccaactgaaccacccaggcacccctggttatggttaagtctacttatgaatggctaaactatccttcttctaggggaagccactctaagggtaactccctgcaaacaaggtacatgccagcacgttcaccaaaggcgagggcagacctgtcaagttggccatgtagatagatggcttagactgcctgccagcaagacctctgggtcacccacccagtgggaggtctcaagaaccttcccccaggataaaatggtaatatggggtggccttcaaggattgctcatttgggggactttgggtctgtgcctttcaagatccccaggagacaagagcagttactagaactttgcctctttggaaggtggaaacgtttttctgccttctaaactgtcagccattttttaaggattgcgatgaccttccaaacatttgggtgtccaggccatacttatgttagaggctaaccattttaaggcaaagccttgagcggctttggtctttagtgttttgtttttcctattagatagattctattaggtcttctagattaaagtgttagaattcttaaacattaaataaagccagtgctgaatagaatcctttcttgatttatttatttgcttttgaggatttgctgtaaggctatccccgtaaccagaaatgtagcatggctcgtgcagacatttgtgtacgtgtgttttgaaattaaaacaatttttttaattataaaatattgtgtgaagcatagttctagaaaaactagaaaatgtgaataagcaaaaataagaagcacgtttcaattataccttttaaagtgcatttacttaccattgctaatatatcccttactgtgtatatgttcttcgtgactgtttttttagactttttttttttttttaaataaaactgaggtcctactgcttcgtaagcttgtgttttggtgctgaatagtgaatgcattgtacacatctttccacatcatgaaatactcttccgcaaccttattttggtatctcattgcatggatagtgcataattttttttttaactcatgtctatgtctggtgcgattttgagactttgtgtagaatgggggatgggacacggatgatgtgactggggttttaaagaaacccatcaaatgcttatttaaggtttataattatcttgtttaatctcaaatgagcgaccttgcctaagtgcctgggagtaaataaggttatcatctgtcattatctttcatgctcccatgtcttaaacatatgtcacagaagacgcactgtgctggcttttgggacagttctaaattaaggaataattttcagatcttcttagcgtggttgctaatccgtgtaaaaacagtcgcttgtctttttacattaatctttttataggtagtgtgtattcatttgcaatatctgacggtgtctgagccctgtttttatttttctcttcccgaatttgaaatgcgtttttgttgttaaattgcttgggagttacgagtgttgtttttgatgtgacactttaatatctccttttcctaattaagaggatctctgtggctgcaagaattgctggagacacttaagtggaaagaaaaaaggaatatcatggcaacctccttttaaagtagcattggaggggcgcctgggtggcgcagtcggttgagcgtccgacttcagctcaggtcacgctctcgcggtccgcgagttcgagccccgcatcgggctctgtgctgaccgctcagagcctggagcctgcttccgattctgtgtctccctctctctctgcccctcccccgttcatgctctgtctctctctgtctcaaaaataaataaaacgttaaaaaaaattaaaaaaaaagtagaattggattctcttatattctaaaaaaaattaggatatgcgttggtatcatttttccttcatgtcgtataataaagttggtctggtggggtgtgttgctaatttgggggatctagttaaacacagcctgcttgagaacaggcaaccttctagactgttaaggccctttgttcatatgatctggccattctttcatgtttatggtagaaaagcaggagaaacaggtttaagttatgtaaccatgtaaactgccagaattgaccctgaacgtggggcacactattctaaaaacagcatgaattcctcttcatattagtggaacttctcttctatggaaacttcctttccagttgagccagggatgtttttacatcaaattagccaccttcagttatacatgtatttacaggttcacctatagcttagtgtaaatttaagcaaacccacgaagaggtgcatatttttcccatgagttagatgtcagtaaccgttctcctccacttctgaattatgtggcaaaatgaattcaatgcttgtactaacaattttatcacatgcctgcactccacgcctgtgtccacatcctcctgccccatgtctgggtcacatggcagtggtacccctgtaaattgagcctgggggttctggttgaggaaggctttctgcaggcagttttattactttttaattattttaacttaatcttcgttaatcccaatctcaggattgggagatctttaatggctgtttagaacacagattggcagactgtaagacctggggccagattcagtctgcagcctatttttgaagggcccatacactaagactttttttttttttttgaatggtagaaaaaaaatccgagcctaaaatatttattgcctcaccctttcattgaaagttagcttacccctagtttagaaagaatatcactttgttaggagggtgtttttgcttgtttgttttgatttgtttttaattttatttattttgagagagagagagagtgttaaggaggggcagagagagagagagggagagagaatcccaagcagtctcttcattgtcagtgcagagcccgacacggggctcgaattcatgaactgtgagagcatgacctgagccaaaaccaagagctggaagcttaaccgactgagccacccaggtgccactgtgtgtgtgtgtgtgtgtgtgtgtgtgtgtatgtgtgtgttaatggtagatactctgttaaagatacctggatacaggcacctatagttgaagttttatttcatttgttaaacaaacttctatcaaagtgcccatctgccagtttccggcgatctttaagaatgtgtaaaacaggggcgcctgggtggcgcagtcggttaagcgtccgacttcagccaggtcacgatctcgcggtccgtgagttcgagccctgcgtcgggctctgggctgatggctcagagcctggagcctgtttccgattctgtgtctccctctctctctgcccctcccccgttcatgctctgtctctctctgtcccaaaaataaataaacgctgaaaaaaaaaaaagaatgtgtaaaacaaaatatattttcaatatatctattctggggatatttttaagcagaagtaaaagttaacctgaattgttttctactcctattttagctgacttaagttcctttatcgtaacagtgtgatggcaggaatacagatttgacccaggcacaaatagtgacagattgctacaaagcattgctatgttgccattaaataccagcagacctacagtcataaaaacaaaatgcatccttatgagccctcttcatttagtttctttattgtttggggacctaagttcatgttctttgctgattatagagcgtgggtaaatgtgcatgcgtagcaggagccggtcgaggtggtcgggggcgagaggagttcaactccaaaatgcttctgcaccggttacttgtgtgtctcctttcacccccaccccagctcctattatctgtgctgtgttcttaaaaatttgttttgttcttgctttccgtatgggcctgatggtggtaacaaggaatatttttcaagatcacatatttctggggtaaatcagcaaatggttaggatttttaattgcatgagccataaattctcagtagagtcattaagcactctgaaatcagcctacaagctgatcagtgttgttggagacactggaatgactcaggtccatgaagctttgaaaggagaaaaggctattttcttaatctccgcaggaaatacataactcatacacctcttaggcttatctaaacctccaacttgggaggaattagggaatgtgtcatttggtatactgctgattgccgaatatctcagaaaccacagctcagatttaacctggagaattgcagagttatgtatctttaaaagcaaaatgcatatttaatgccttacacagtgcatcgaggcacttacaaaatgcagatgagcccagattttcatttttaggaatcagatttatacctagctcattctttatgcattaaacattttcatagtgcaacttgccatgtagagctgaaactgtactcatgtaatttagccttttcaaaatgaggtctgtcatcaccaatgttaggacagggctgggattagggtgaggcgccttgggtgcaaaatttaaggaggtgctcgctgactgtgccagccctatatttacaaaccttgaggagggtgagtgccttcttaaaatccacaccctatgtgtttttctggcctcaccctagtcccggccctgatcagggtctttcataggtactttaagaaggcacattgctgggtcagatcctcaacctattgaatctctgggattgggttggagggtgggggtgggggcaggaatctacatttaacttcttagtgcttcaaacgcacattgaagtttggaggccttctgagcttggttggccaggctaaggaccagctggataaaagctccctgttagccttaggttacaactggcctgagacagtaacttagaaatctgcccaattaaccagcacacaagaacaagtaggccagccggacctcgccacttgccgggcctggccgttgtgtaactgctaccaggtgtcacgctggaaggcttggatcttgattgtagccagagctaaatgtaactgattatgtaattttgagctgttccaatttttttaattaaaaaatggtttattggttcattattagctccatgttcattgtaaaaaaaaaaaaaaatgagaaggtaagtcgaaagaatgaaattgaaactctccgtaacccagggataaccattgttaacatctgaagtatcctttcagggtttttttcccccccctactggatttatatttaattctactgaaagaatctatcgtgtggcattcggaaggatgggtgacaaaaagaatgttggtataagggcatctgtcttagaatctcgattcccgtctaagtcctatccagttatctttcccatctctgtgtagaccctcccccctcaccttgaatctctgcgctaaacaaaaattcacatgcacaggtagatgtgtggctatcttacggcccgctattgcaaaatagtggaaatggtgccccccacacagggaagtcaccactagtctcttcttctaggtcccttcttgtgattctaatcgaattcctttgactctggggaccttgttcttttggaggggaattaattgtccacgcagctctgcccctgctccacatccgaggtacagtcagtaagacgtggttctgcccttgagcacctagagtctgatggaagaggcagaccaggatgtcgtataagagtgtcaggtaccctaacatgctgcaggaacagggaggagagaccaaccaacttggctttggagagttgagcatggcttgaaaaaggagatgacacttgaatggagtccagagagacctgccgtatggcgcctcccgtctccagcaaatagcattctcctaaagttccactgtttttttgtgttctgtcctacttttcagcccaatcacacagttgcccatgataattaaatgagacttgccagatggatgcttttgcaagacgatggctcgtcttcttgctctatttgtgaaagctggcattggatccaaactctcaaggaggcccctaccttgagatcgctttggagtgccgctctttcgtgcatattagccaaatggcctgcccgtccgcggggccaggctgagtggcaggtgggtgtgccatgcatgcggacactctgatccctgccaagctgttttgcctgcaaggaggtgaggtgccgagaggtggttctataacattcccttcctttgagggagttagctcctaagcttccgatctgtccgtcttaaccttctcaccacgtgtattttcccagtcagttgcaacatactcgatgtcagattcccagtgcgttgagttacaacacatacacgttaccacgttatctcaagcactttgtacgtcactgaagagagtatttagagtggcaaatacagttaaattaggcggtggcagacttgattcaccaaggagggtaggtagtctgaatcgaaaccgataactgaatcattaacaaactaataacaaataaatctatttcatttctgtgcgtatcattcttccttcttggtgtgctctatctcatttaattgtcatagcatcgctgtgaaatgggtacggtcattattcccacgttacgcaccaggaggcccgatggggggcgggttcctggtaggtgtgggcgcccttctgcaggcccggccgccacgtgtgcggcctcccatagttctgtgcctgatgctgtgctaaggattcagggtgagcatcccctcatccctgctgttggatgctcacagtctggcctgctcgttctcaaagggttagcagtcttccaatgtatctccaggagaacaactgaatgtaataagttcattttcctttcactttagaaataatctcaagaatttgcagtgctttagggcactcttgattgaataccagttgattattgtagttacccagaaatgtcaaattagagcatgcctgctgatacaatttactttttcagtgattgtacacaggttttaggtgtatgtatgaataaaactctcgggctggcttcctgttacaattttctgcccatattttgcatttgaaataaaacttcggagttcaaagcccgtattgtattctactctcctgtttgggtttctctgtaaatagtatgattccgttctttcattcgcacccattcccttctgtcccaacccccccgccccacccccaaaagaggaccttcctgagatgggcagagggaactcctcttaatttcatccattccagtccgtgccataactggaaattcctatggcaggttcagtgatgtgaaattctggtggcaggaatcttaaacgcgatttccaccttcccaacagtctggcatcctaacgttcggattagaagccgtctttccgattgcccctcacaggacacagaaaccctgccaggtggtcctgcaaaccccacttcagtcatccccgaacggggagctctcggggacccccacgtccgcagtgtggacagtccacgctggggttgggcagctctttgtaagcccctcccggtctgatcctcacttctgcctccctccctgcttcagattctcccctttgaatgtgttccctccgggtcctcttcaaacctcaagaaagttctaaggacttgaaagcaagggagggaggaagtcttggtgaggttttccagcagtctgacgtgtgaccgtctctcttttcctgcagcaaaaccagaaatcctgactcatgaaagtctcgtgagtggcatactacagtgtttggtagccggattcccggagcccacagtagattggtatttttgtccaggagctgagcagaggtgaggtgatgattttgggtaccgcttgacatgcgtaagggaaggactgtaatttggttgcatttcagatatgtttgcagatttttttttttttttggaagctttgtttattttgttctcctctccacgtggctttgtagggggcacaattgctctatttttcgtgggagacgttaattttgttggctgaaaaatgattactgagcgacttctctattttggtggttatcttttggatttatcacgcaatttctagcccgcaggtagataaagcaattttccaggacagagtaattagatttccattctctgcacaggaggtaatgtgtgtgggaaacgtggctgcagttaccgtgaaaaaagttacctcagaagttaattgccaagttaccaaaaagtaatgatcgtgcagttaccacatacatatggcatctgtaagctgcgtgtttttaaaaggttttctccttgattaggtgcccagcccctgagcagagcacatctggcattgtgttttcctctccctcgtaatctgcacttaagccttaaattgtcctttcacattacctgaagatgaaaatggggtcaacgttgctgtttttatccatcaaacgctattttgtgctcgggctttaaaagcccagtgtaacatcaccattgaatagtcaggataataataggaattttatttttcacagaatagacctctttatcacgacgagttggaagaggttacgtaggattgttgttttcagcggagttttagtggaatgttttctttggggaacaataaggagggctcgagacccctggaaatgccccggcagtggcagtaaccccagcagttactgtgatgtgtgcagcaaatgtttctggagggcagctgtatgctagacgccggtctggtgagcaaaacacacctgagtcccagctttgtgagtttatgtctaatgggtagaggtccgcgaaagatgaaatgaacagctaccgtaatcgggtgttaagtgccaaggggaaaaataaaacgaggtgagggaatagaaaggtattgggcgtatggaggacataatttaaaatagggtcgtctgggtctagcccctgatgggctttgctgcctggagtacgagccgatggtacagcttctgtctccctacatgaaacctggagctgcagggtctcagccgctggggatttgggggccgccctgtcttcatccttgtagactttaactctttcctcctctaggctcttctctttcaacgctcatgtgccgttgaaaccggtcatgaaaccgcttaatggaataggtgtttgaatcgggattcgaactcctgtctcactccctggatcttcttgtccaccatgctgttctttctcactgtgccagggaacctagtgcccatctgtcctcccgctgttggtcgtaaaaggaaattcctgattatgacctgctaacttagtttgaaaagtatgccaaacccattgtatttcatgatggttgatctttctggagtaaatcgggttgttatttttcttccctctagatgtcctgttcctgttgggccactggatgtgcagatgcaaaactcatctgtatcgccgtctggaaaactagtggttcaaagttccatcgattacagtgctttcaaacacaatggcacagtcgagtgtagggcttccaacaatgtgggcaagacttctgccttttttaactttgcatttaaaggtaacagcaaaggtatatttctttttaatccaatttaaggggatgtttaggctctgcctgccatatcagtcatgattttcagtccattccaccaatggccatgtcatttctggtaatttctacattgtaccatgccgtcatcaaactcactaagtttcattctgcactgtttgttaataacacgtatgtagtgattttaactgcacactttatatttacatgtgtctgtgcacatatgtatgcatgcatgcacgcgtgtgtgtgtgtgtgtgtgtgtgtgtgtgtgtataaaatgaatcgcatatttccaatcatttccatttaaagagggtagagaaaaaaataggggagtatatttaccgtatagccaaacataaccagaattagggcaatttagaaatttaaatttaatttaaaattttagttatttaaaatcacattttaatacgtcgccaggcactgtatcagaaagctaacactgacttttatgaagtcatgtcagtgaactatttctttaatgtctgcaatatttgaatcatgagtgactgactacctctgctaacataagttaaatgatccttgtggacaaattgatgaattggtatgaagttagaagacaaagaaaccgggcgcctacattcttagggcttagtttttgttttcttgagttggcaaagatgtgtgccaaaaaatcgtgtgttttcagttttgagtaatgaaggaagaatcttccattgttcttcatcatagatttttttttttttttttttactcaggcaatgaaagaacattttaaaaatgttttcttacaatgttttcttggttgtaaaagaaattcttgctcaatgtagaaaatttggaaaatgcagggaagcataaagaagaaagtttagaccctccagaaaggaaacttcttaaagctgtccaaagcaggaatttggttgaagtacaaaactcattcgtatgttgttttttgttgacaagcggcataaactattcttgtgctacagaaatctcaacctccacaggagcctggtttcagttgttatttgaaaagattcctttgaataacaagagtaagataataagcgaggcaaggagcggagaatgcccatggctttgaaccctgccatgggctgtaaaatgggagatgggcgagtttggggtcaggtggttgtggtaaagatccgtccctgccaatagattgtgattccacgttcccctttcattttagaacaaatgcatcctcacaccctgttcacacctttgctgattggttttgtgatcgcagctggtatgatgtgtatcatcgtgatgatacttacctacaaatatttacaggtaatccttcctttgctctctcccctaataagcgctgtaatgattgaaatgttcatcattaaaagacgatatacctttccctttctcccccgaccagaaacccatgtatgaagtgcagtggaaggttgtcgaggagataaatggaaacaattatgtttacatagacccaacacagcttccttacgatcacaaatgggagtttcccagaaacaggctgagttttggtcagtatgaagccggggctttccgtgtaacctctttgggtgcgcataacaaagactttagggaaccccaataacttcctttgttctgttgcacctgaaaccacgttttctgtgaaatgtcaccacctttgatagagttggcctactgcacattatagggagatgtcatggacagatttgtccttaattccgtaacagttccttaatcgttgagttggagattacacaggtggtccattggtcccaacaccaccacgtgctctcttctcttcctttctgcagggaaaaccttgggtgccggtgccttcgggaaggtggttgaggccactgcatatggcctgattaagtcggatgcagccatgaccgttgctgttaagatgctcaaacgtaagcttttctcctgtaggctgctgcatgccctcaacattggcttgccagatgtactttttgctaaaatgagatctctctaattttagcaagtgcccatttaaccgaacgagaagccctcatgtccgagctcaaagtcttgagttacctcggcaatcacatgaatattgtgaatcttctcggagcatgcaccgttggaggtaaagccatgaccaaattaccttttattatctttcaaatgatcaaaaaaggggagattttaatacaatttcgacaatgctcgattataagcttcttgcaagatttttgcccaggttgttacctcttgctcaatttcacgcctctgctcccaaaagtgttgttcttcagagtgtgtatttgagttttatcgtcatgggtgggacagcccaggacataccctagttactgtcacatatgttgcctcgacattgacctcctgagtatcttgagaatgtctcctctcatctagcacgtctcccgatcttgcaggctttatactttgctggatcatttgtagtcactaaagggttaacattcatttgcacgtcataattaaagatagacttcgaagcctgccagttctcaaataatgcaccaaatgaggcagacacttcacttctgcaagaaaataaatttccagtctgaagcagttctgaggtagagccttccatcaaggatttctgtgatgtttccagaaaacatgttggtccaaaggaccagatgagccatcttcctcaagatgtacagagattcgctgtcaagttgacggcctccataatttcttagaacagcccccgtgaaggtggcatccacatcatgcatggttcgccaacatgtctgcccaagtgaattagttgcctgttaataacttcagggctgcagttgtaggcacggtcacatatcagctggctgttccgttgtggttgctttttcttattatgcagtttgttctctgtgtcatttccacaataacggtgggagagggtgtgggcccctccaaacagaagtgaatcaaaggattcatggaggaaatttgatagtcgtacaacattgaaagcggtaactctttgtaaagctagcagtcatgcctggctccaagcactgacatactgacattacttagaaagtcaggtaaaggggacttgcttgttcagtgtgaccccacagaatgctattttttgccagcagtatcaataggtaggattgtattggtactaagtggtcttatcaaacgaacctgaatgttaatggttatgatcactcctgagtgtaattatggagggggggcagcattgtctatatatctcatctctctttatttaaccttctcttatatgcctgtagggcccaccctggtcattactgagtattgttgctatggtgatcttttgaattttttgagaagaaaacgtgattcatttatttgctcaaagcaggaagatcatgcagaagtggcactttataagaaccttctgcagtcaaaggagtcttcctggtaaggctgatttacataaatagctgttgacaggcagttcgaggggtcataagggtttgcaatcaaggccgattgttaaaaaaaaaacaaactgaacagagatacttcgagtcacaaaatcagaattattaaatcatttagatgtcaccaacaatttagaaagttcgaatagtgtttgtcaagatttgaagagtgttaaacttagatttccgttgattttttaaaatgcatctttagtttgtttcaaggcattagttctgttcagttgaatgaattctgtacctgtttctcttatgactctgttcttgtgtgtcatttcattcaccctgtcgggcttgctactgtattgttgcgttggctcggtaaacttcttgaaaacctttaacagagtggcagagagctctgaacgtatctctgcatgtaggtttctcaccatctacctctgaattatttctgtataccttgcccttttttaaaaaactcatcatgctataaaaaggcacaaagactagcacatttttaaaagttctataccttattttcatctgttttatccttaatatagttctgaatttgaatgatgtgtaaggagcttcaaattcctttaaggaggacgaatgtggcttaccaaccagaataggattcttctctgccataccgtgcctgttctttcccaaggttgagatccaccatttatgagggtttcctagattcacccagaggccagcagaaatcatactcctcccttatgctctatacttctgaaattgtgtattggatttctcctctgccttttattcactctgtccccctgcattttgagatggcaagacgttgtctttcgaacttgactccaggccctcaagaagagcaaatcttattggtggacggttacctcttaaagcccttttctgtacctgccctggctaaagttttaaaccccaggcgaaggctttttgttttattttttttttttagcccagtgaatttgggtagtgtcaggtggtagtaaaatgcagtacaaaccacctttggttagtttctccagaacatatgctctttgtataaataaatgagccactttgccttatttctaaaaaccttggccccatagatatttttcaactttctgaaataatggcctaaattgttcaatccgacgtggtgttctttgtgcactgggatcccatatgggactggaaccaccagcataatctgaaggagattgttgtcacagtgtttctatgctaatcagaagcaggaagtactagaaatcttgaagactttccagccaaatgttgcagattcaagaggtccagatggttcagaaaatcatccaaattattggtgtttatctgaactaaacttggtttttttaaaaccttcttccatcagtcgctatatgttaacgatccctgccttccccccataacacatctcagaagttcttgccctctgtgtcttgtctctttcatcttgtctcttggggctaatttagagagtttaaggggatgggggttaattttttttactctctgtttccccattaaatccctggtgtcaagagatggggaatttctaatccaaatcccatctacgattgaacacaaaacatgccgtctcattcctggggattggaccctaatgttgaatattaaaatctcctatcttatggacaagattttcttcactcagacttggcagtactttctttgaacaaaatcagcctgttctgtaaagaagggaatgagggtatagagcctgcctcgtgggtactcccctttttcccattttgttcagtcatgatttgatggatggatatttcctctctcccagcaacgatagtactaatgaatacatggacatgaaacccggagtttcttatgttgtgccaaccaaggcagacaaaaggagatctgccaggataggtgggtacctttttcatttcgagaggatttctcatactgctatgaaatataataccatgccccatagtgactggttccccattatagtagcccccaataacagtgccaatgttgaatggcagttaagggttccaagtgggtattggggtcagagcatttgttactgtgtatgcgcatcttactgcatgtgtgaaaatatatgtgtatcaaatatgtattttgcatgtcaaaatgtatcagatacatgttttacatatcaaaaacatgagatttttgtattaattcacgatcctgctcctctgaggccccaggtgatgaatattaactttgtgcttgagcacttccgtttcctcagcaccggggggatgacctggctgcacgttcacatcagtcccttcgttaccagccctttggtatccctgttgtcaccatcttctgttttccttgctttgaggtttaattgctaacaaagtccttctcctcctaacaggctcatacatagaaagagatgtgactcccgccatcatggaggacgatgagttggctctagacctggaggacttgctgagcttctcgtaccaggtggccaagggcatggcattcctcgcctcgaagaatgtgagtgggcgtggttcccgggaaagcactcccacgccaacccccccagccccaagccccactttggagccatagctcgaatgcacagtgtcattttaaagtgcagtaaccaaaaacagaggagatttagtttcttcatattccaactgctgtctttttggaattcctggtctcatttataagctttaaagtgcaagcctgtctaaatgagctttctatgaatatttttttttatgcattgaattcatttaaaaactttggcttttaggatatgggagctgctcttagaaaatagagagaatgatttcatcagcaaaaggaaggggtacctcatgcagttgcaatgcttggtgaaacacatacttgggctttattgaagttggacctcacatattgtatggtttatgaagtgtgggggaataaaggagtcagaatgataagcatttggggaaaagatggggatgggaagagaatgataggatcaaaacaaggaacagagcctctggaagggtgagggggtgccctagcaaatgggactggcagactaggaggaggtaacagatcctccccgtaagtgtcactggtgacatttccaaacaattaccaaactaaaagaggatgtaggatggctgaaataaagagcctcttccctgtgtccttgggagacatcaaattgaagttgcaaacacatttcagaaactctataaaaggacattcaaaaagaagcatgcaaaatgagttttcagtttaaaaagtatgatgtgactatttataatgtattttcctgtgaatgaaagcagtcctaagaggaagaaaatgtattcgagttggttttgaaagcgattgtagtaattaaggtcctaacgatgcgaaacacacatcattcagagcgtaatttagatgtttatttttggtgcaccaaatagtttcagtgcgaagccaagttactggacctgtgtgacagaagcagcatcctaacgttgcacgtagttttcattcttgaggagtttaaaataaatgtaaatggttttcttttctctcccactctcctaatagtgtattcacagagacttggctgctagaaatatcctccttactcatggtcgaatcacaaagatttgtgattttggtctagccagagacatcaagaatgattctaattatgtggtcaaaggaaacgtaagtacccgctctctgcttgacagtccaatgaaggatgttagtctcaagtttttctaagaattgctttttatgagtttcgtaatgcaaatcctacctttgagatagcatgcattttagcagtcaaattaagtgtccttcagcaaaatttgcatggtatgctgaacattactacaactaacattccgataatagaattcctaattctaattgtgtaattatggggcatgtgaaggaaacagaaatagccttaattttcattatagcctgagaatagcaatgaactctgttttgttcaagtgaaacaaatgtgggcctgaaggtcacagcgggggaattttatctggagattgacatgctatgtgaaaaagattaaaatctaaggttatgttcagaattaggtatgtagaacgttggatcttataaccaatagagagcatattaaatagtttcgtaagtaatcatgggcttatagaacatagtgattttagttcagagtgctttatttcgttgccaattttcattgtatcctgagaacaacccctgggtgttagaatgcaatgtcttcactctttcagagttggagaaactaaagcacagtatgttttatatgttttagtaataagcatcactgattctgagatgacacaggtcggttaaaggctgaatccagaacccatgatctacaaagcagcatcccgttagtctgggaagccatacagtcccgtgtatatattcttctgcatctctttcctaggcctgtttccccagtccagatttattcctgatggtagctgtgtgtgtgccttaggataatgaaatattttgtcctgcgttactgtggccatctctatgggtaggctgtacttggcttggctttacagaagtgtttctggctttccttcctgatcaaggcatgtgtttctaataaatctcttctgacgctgcacttcattattacgagggttaatgaaaccaagttctctccatcccggtgcatgcactactggaagaaagaatgagaggtagtccccgatccaggccttggaatattgacagaagggcaagaggaggaagacggcagtttctggactgccgttgccgagctcgaatctggttccatcatttaatggctctgtgatgtttggcaagaattccccggggcctctcaaccttgcttctttttctcttcttgggaaatgatactgtcacctgactcatcaagttgttaggagggttaaatgagtgaatctaggtgaagtgcttagaactttacagagttcaggtgcgttgcagccaacatgcacgtggcgctcgtgcttctgactgttctttatagatgtcttatgtgggatgtaaataatcatgacagcggttatgctgcaccttcttttaatagcttgtgattggttcgcgacctgtaatgaacaaggatgggttaggtcccaccaggcttctagattgtgggctccagctcaagtctgttgcacgaaccaattacagatctctcttcaccaggctcctgggcgaggaggatttatgggacaagttaaaagcagggaaactcccacaacacgttactgcctcagatttgctacatcatagtcatgtgacatctccccgtgtcagcttctcagcaagttcttccattccttgtaggttcttcgtcatatttctgcgggtgaagccagcggataccttgtcagaacattgtcttaagtgcataaaataaaacctataggattaccaagaaaagcagttaaattggaatatagttatcaaagtattaaaaaaggatattttttgacatcagtacgcgtgtttctttgttacacggaataacctgttctagccgtgggtctaaaaactgatttcaaagtggtgatgaatataaacactgatcatgatggaggtgtctgcagtgactgttggtgatggaatcacaggacctgctgacattactgggctttattgctttcatccagaacttaaggaaatgctaaacttcatttagaagttagtgaaaataagaatgtgtggcattttttttccccttccaagtccacaggcccctgagttcaggacaccttcaatctcaggttaaagctccctgtaggaacttaggtataaaatctgggaggggatactggaaggtgtccttccttcctcccttccatccttccttccctttcttttcttttcttttcttttcttttcttttcttttcttttttttcttttcttttcttttcttttcttttcttctttcttttcttttcttttcttttcttcttccttcccttcctttttcttctttctttcttccttctttcttttcttttcttttcttttcttttcttttttttcttttctttttcttttcttttcttttttttcttctcttctcttctcttctcttctcttctcttctcttctcttctcttctcttctcttctcttctcttctcttctcttctcttctcttctcttctcttctcttctcttctcttctcttctcttctcttctcttctctttccttttcttttcttctttcttttttcttttcttttctttcctcattcctgctggctaaaataactttaacactagaaaaacaaaattgtcttcccagtttcaatcctgaatggattaagagaagcactgagttagctttttgtggtagattaagatccaggaatccagaatgtctgtaagagcaatagtcccagcaagtctgactcgattttagcagagagagttcaggatgtgaagttcagctgttgaatgtaaagaccaatctgcctcttgccaccttggaatagtcccagtcaccatgagccgcccctatttattgtgtgctcgcttgtgcaaggcaatcgtttagagattggtccgtcggcagtactgtggtaagcacttttgcctacgtgatctcatttaacccaccaaacacctcgtgaaatatgaagtattatttttgctttctagcagactatattgagattgtctttttaaattttttttttaacgtttatttatttttgagatagagagagacagagcatgaacaggggaggggcagagagagaggaagacacagaatccgaaacgggctccaggctctggctagcagcgtgcagagcccgacgcggggctcgaactcacggaccgtgagttcatgacctgagccgaagttggacgcctaaccgactgagccacccaggcgccccgagattgtcttctaattacagatacttgtgaccttcccagtgtattcatgaaggatggtttgggtttcataggacagaaaacccaaaagaaaagtaaaagaagtgtagtagccgcaggccacggctggtgtagaggttctgtgaagcactcaggaccaaatccttttacccttccattttcttacatctctggtgtagccctcctgttcttggcccaaggtggccactggatagccagccaccacaatcggaaggcagggtggaggagggatgagaagggaaagagcaaagggcacatgccagccatcttttaagaaggtcttcctatagttgccgtatcatacctacaacctagtgtccagacttgagtcgcatggctacaccaagctgcaaaggagctgggaaatgtcgtttttattgtgggaggccatgtttctatcaaggaaaagggaaaacacattcagtggtaactcacagacctctgttactcaaggccagtggcggagccaggatttgaacccatgtgtctgcctctgacggctgtgctcttaaccaccatgctgtattgactcagtgtcccgcttttgaaaatggggataggatcgtgtgagcccccagtttcagaggtagtaggagtcatctgaggtcctaggggaaaaggcttttgtgagatggcgggcagtcaacttctcaccctcaccccctcagcaggagcaatgtctacaggaattttttttttttttagcttcttaattaacttggccgaatctgttgtgcttccattacaggctcggctacctgtgaagtggatggcacctgaaagcattttcaactgtgtgtacacatttgaaagtgatgtctggtcctatgggatttttctgtgggagctgttctctttaggtaaaatgccttgccaaaggcaccttggttagactctgcatcttctttaaggtttgtcagtgtcctgcttgcttattagtaacactgatttgcaaactgtttgtgcctcaggaagcagcccctaccctggaatgccagtcgactctaagttctacaagatgatcaaggaagggttccgaatgctcagccctgagcacgcacctgctgaaatgtaagggccgacacgttttccttcagatagtgcttccccttttattttcctttacgaagatagaaacccagatgttaagggttttcactagtacggtttgaaatgtcaatgtcacctggttcctttttatgacatcttgatcaaatgtcatttttgtagcttattttcataatctcttgtcaccaaatatgcggaaagtttcagccacctttcacatatacggtgttttatttcatcacacacgtgccattcagtatgtccgtttgcacggccctggaatttgagattgtcacatggcatacgccgtgagaagccaggttaacggcattggggggtgagagaaaaatggctttctgctttgcaggtatgacataatgaagacttgctgggatgctgatcccctgaaaaggccaacattcaagcagatcgtgcagctaatcgagaagcagatttcagatagcaccaatcatgtgagttccctctggccaggcgtagaacctccttcctttctcttggttccagatgcacccttctgaggctctgggggtgaagacctttattcatcccttctctccttggcttaggtgacaaactgggctttgggcagccacgtaaagcaatggaaacagttctttctgcccggctcccctttctgagcctaaacacatgagatgagaaggaaaaagagtggagggctttgcatgcagaaatgtggaagcggaacgttccataaggatgcgccgtgtttcctcccccaccccaagtgccggtcatggggtcggcgtgttctctgtgtcacgtgtcatggcccttcagcctttggacagtgggggtgatgtgaactagaatgaaggcatagaaaagacggcttgttactgcagtgaaatagaccttctgctcaaacaagcatagccagaaaatggtagctagctgtcatgcccacaagccatatagaatgaagagctgtttgaagttgggagatccctcccagtgatttggggagggggggcgttcagaactcaaatccattatttcttctcctgctcttaaggaagaattcgtgatccttactataactcagatttctttaagctgcttttttttaatggatcgtggctcggagctaccttttctaagagcacaccactgatatttttgggttaaagcttgcttttccgggtgtccgagcggatttcaaatacaacagcatttcccacccctggaagggccaccgatttcccagcaaatgacatcagccattgggttcatcattggccgcagaggtttataaagctttttaataggttagatgatacttgttcccagatgcgtcccagcacatttttttgccatcactttttatgtatcagacctggggggaaatgagggctaaaacaaagcttgtgtttccttttgtcaataggattggggttttggctgtgaaagtcttgtaagtctcctccctttaaaaggccttgtaagttatttgcgatcccgaagcccaaatgggcccctttgtcgttgtgttcatggtgtagggactggcatgttaactgtgggcttgttttcctcagatttattccaacttagcaaactgcagcccgaaccgggagcgccccacagcggtggaccattgtgtgcggatcaattctgtgggcagcagcacatcttctacccaacctctgctggtccacgaggatgcctgaagcaggaggagcgccggggtctccccagcgagaacgatccctcttcttttggttcctatcctggttatttcgttcccccttcaactcgcatcctgttccagggtagaggacaccccgctgtaatcccgtctttgcaagcacactttagtggccaatgatctttgtcatcagccaccacgctattgtaagggttcgaactgcacatatccccgataacgaggcagcccccattaacgaaaacaaaacaaaacaaaaacaaaatgcagacttggagcaagggagggtgggatgggccacacaccctggggcctttccaaggcttctccactttctgtttgaagagcagagttgatagtttatttgaataaatggcagtagtcgcctttgggcctcagaaccatccataatgatacgatgacgcagcaagattagaagctgaaacctgatctcttgatgtggaaaatggaatgttattagaacaaagggcagaagtctatgaatatctgggcttaagaaatctaggatttcgtgctgaggaatgagacataggccatggaaaaatgctccccgagcaggaacataagactcgctgctgggcatgagcctttgtactactgacctggtctgtaaatagagttcgctgttagggcactgaatcggagagaaggcctccccagccagcatttgtatatactcatctataaattgtacatgttcatatattgaggagagaaaacccacaagatgtagtttctggatatgaccctggctcaagtctgctgtgtgtagaaatagattaagggccagacaaatttgaaggaaacagtgcttttttttttttttttttaagaaaaaaaaaccataattgccaagcacaatcttaacagagatctccttttgtagcctatgaacttgctctgcagatgctccagaacaagcctaccagcttcagaatggcattgtgctcaat

SEQ ID NO: 21 - DNA, 81517 bp, Canis familiaris
  misc_feature (24515)..(24770): n is a, c, g, or t
gagctccggtcccagcgcagccaccgcgatgagaggcgctcgcggcgcctgggattttctctgcgtcctgctcctgctgctgctgctcggcgtccagacaggtgggcccccgggtcgcgccccccgcgtgcccaccccggcgccgccggcgcgccccggggctgcagcccgctggccgggggtgggggtgggggtgggggtgggggtccgcagcgggggccgacgaccctccggtgcccgtgcttctccgcccccggaggctcgaggcgtgcccgggacggccccgcgccccgcctcgctcacctgcgcggggagcccctggggcgggcggcgggggcgccgggctggggtccggcggggcgggagggcgcgagctgtgcgggtcggggcggctcttgtgcgcggggcgcgcgggggccgaggcgggcgggtccggggtccggggtccggggtccgcacccagcgcgttacctcggcgcggcgaggcgaggcgcggccgctgcttccttttgttgaaagttgcgcgtgtgtggccggagcgcgcaggttcgcggccgcgccgagggcgaagttggagagcctctgctctgcacaccgcgggcgccctttgtggcccggagctggggacagaggcgccgccgcccgtccccgccgccccccgggtcgccccccgcccccggttataggcgtgtccgccggggagccgggcccctgagcctggaggcggcggctgcggggaccactggggcagggcgcgtgcaaagcagccgctaggctgcagactttttgctgttgatcccacgccggaggctcgcccctttccgccgcggggccgtttctttcctgccacgcgcctccgagcggccgggaggcagcgaccgcgcgctggggcgccccgggcccccccccccccgcccccgacagcccggcggggctctgcgagccgctcgagccggggtctgcgccctggaaccgcggggccccgtcctccctgggaactgggaggtttgcaacaccccgccccacgtgacagctacactcctccggggccgcctggggcgggggtgggagacgcagtggaactttctgcaaatcgtacttgcatctgtagtgaaaacccggttctgtgtgcgcgggaacttgggtctgaaggtggtggtggtggtggaggaggaggacttgcaggctcctggaagccctgggtcagattcctcccctcccctccaccccccctcccccgttttttttttttctgggtgtcgctagtgcacgagggagtgctgggcgcccggctaagccataaaacccaggtcattttttttttcttttttgaaaaaccctttaaggccaccccgatggtgcaaggacagaaagtgagtctgacctggaatttaaggggcttaaaaaaaaaaaaaagaaagaaagaaaaggaagcatcgttatgaactgtcgtgtactccattgaccgccgggcggtttcccctaaagtctccaggtccagccggcctgctcccgggcttggaaggcattgtgcgggctttcctgtggaggaagagaggccttgcatctggaccccgtgagatgggggggagggggcgtggatcatggaccagggcccggtttccgtggcggatttgaccgcttaagcttcaaatgacacatttggtccttctgtctttgtgccttggcattttaaattgcagttaaggtatgttcagggacccgaatagggcgccagaaaagacagaccacccagaatagttccctttttaaaaattacatgaatcggtcgcctctgtcttcatgaatatcctgctcccttcaatagatttttggcagagggagttttagggctggctcctggggggcagtgtggtatagtgacagagccttgagctgcccttctcgttctcctttttgcagcatgtattagcggtgtgcccttggcaggtcatttaaattctggaggtcccagtgtcctccagagaacagtgaggcatcggcatcatgaaggatcctttgggttccacattctcctcttccagtgttctgggtgtagactacaatttttctgaattctttccctgattcctttctggctccctgaaattgctctgcctctcccctcccggggatcactggtggttgctactgctcgagccctaggctaaagcaggggggtgtggtttattcctgctccctccccagtccccacctttgcctagtttccctttgaatacaacctaggaggtgccgtctccgtaggaccctccatcaccgctcccctcagtatttacaacccctgtgcccggcaacacgagcctgccaggaatagtgaatcacactttcctctcgttcctgcaggtgtgaggccagagtcatacccagcagctggccaagggacattttggttcttatcctgttgggaataatacagtggtcctgtaaagggatcccagaaaagtcacttagccccattctggtccttccccctcatccacacatttttttttttttttttaatgacttgataaagtctgcatgctgtgttattacgatgcattctctgatgtgccttacatttcattttgtgtgttgtgtagttgttttttattcaaaactgggccaggtccgtgttttggggtgggggagtcggggagagggtttcatgtggtatttctagtcctcccaacaagccctggaggcagtagtcttaccatccttaccattttatagctggagacactggctgaggataagtctgttatcaaagtcatcaatggtgaagcctgacattagcccaactgtatatccattcacagccttaacagaatcagttgtgagatcatttgaagctattcactgagcatatcttgtatgccagggtatcactggaggctctgagaatatgggatggccctccaaattttggtgaaaaaaagacctagaattgcctgtcttatgatgtctgacttaaagtgttctcagtttgagggaagtattcactggggagggggagtcattcaatatagcttccctgggggggtacttaggcaactgaccctgctcctgagggctgtaggtgttagctgtcccattctgaaggcctcagaaatgaagaccaatggtctctcaaatgatgatgaaagtcagttgagattttttgtttccatccccctctccaaaaaattaaaatgctcttagcgttatcgtatacttgtggcatagctgtgaaagagcagactcccaggaatgagttcacaccactggctatttaccctgaatgggcacagttgagccagaaaggcagtttaccactcatagccccaaacacatcctcatcagaaacgtgccaagtgtttcttgggcttccctggtcgtgcgcgtttgtttagggacagatgttgttgtgctgatggattttgctgctgttgttgacagctgccagaagttgcccttaggattttgactcatttcctcaagtctccccccccacccccagccgatgagaggacaccgggaaatgagccacggcgtcccggtgtcccgagcagaaatcttaaagctggccttgcaggatgagaacctctccgaggcagtggtcaaggctgcagcagcgttggctccagaatggatttatttggagggtccacaggctgggacgagggaagtgctttgttttgcagcaggcacgggaggggactttccaaataagggactgaaaggccttggaaggaatctcaagtgtgcaaaatttcataggcggtttctgtaacttgaagaaggtggctttgtgactgcaagtccagagcgaggagcacctgccagggagtaagcagaggtaccggtgtgagtccagggcaaagccagggtaaatctgtgtcaaagggaggggggcactctgaggaagcctggcccaggacctctgattctggacgtttgggacccgagacagcccagcttttgacttcagactaggtagggagacgttaccggctgctggcccctggacatgtgtgttttgttttgttttcctccacatgctgctttttaagaaaacatcgaggcagtgcttaaaaatctggagaatttatgtcaagttctcgatttctctgttctcttgaagaacagaaaactctgcctctttagatgggatttgtgctccttaggaggctccaagagataccactctttgctgccagcccttagacattgtaggctttaagcctcaggcgctggtgagcatagatgggccacgcaggtacctagtggacaggtacctggtgcacaggtatttggtggatgggtatctggtagacaggtatttggtggacaggtacctggtggacaggtacctaggggatggagcacaggcctaaggagtgaagacagccttgtattaattagtctgctggcttcgtggctgagagctttgggggcttggagcaagtctgtcaccccactgaatttcctttttcaccctcgtttcagctgtgcgactttaaattacgaaaccattctgttccagtaaatctgttctacgtgtagcgtttttagaatggttgccagtacaagctcaatacatgtcagtcaataattaccatctgtaaaataggaattactgttttccccaagatggaaatcatgcctactctcatatgattgtcctaaaaatcagaaagagattcttgtccagatgcttggcacagggcctgggatgggatgggcacctaatgagtgagtgagctctgtgaggatgtagaatttgacggtttctctttggaacctttcatgcaaggtaccaattaagtactaacatgacagcttttaacgtgaaataaactttacttcttgttttgagttttatatagcttttgacctaaccgttgggaatccctactcggagactggacggatcttgaactttttttttttttttctcccccagaaagacaaacaactcagaagatttctccagtgaaaacattcacatctgctgatttttcctttcatcctatgctctggccttcatgctctattttggttaccacacactttgttgggtacctgcctccttttctgatggttacgttttccacacttgcaaacgtcaggctaaattgttatccagggcgggtggcatcagagttaagaccttgggctcctaaacgggaccacctgaggtttgtgtccacttgggccccttgccattgtgcgatctgggtgaggactcttcctctctgtaagcctcagtccttcatgtgtgacccagggatgatggcatgggctcccaaaaggggatcacatgccctagcatggtgtctcacggggacagcatgggaactccacatcaggctgattccatggccctctttcagctttgtctcttaaaaaaaaaaaaattggaaatggttttaaaccagattttgtagagggctgtttttggtactaaggtgagaaatgtgtacacttcatgtctagctttaaaaaaaaaaaatccgctggtagtggcaatgcatagttctccccttggttctttgttccactttattcttagccctgtcttggtggatccggatttccagatgaaagtttaggaggggacaggtctgtagatggccattttctcaaggtgaataagtgagggtagctcacttagggtccagggaccctgttactttgtgaagtggggttgaaagcacctcaagaatgaggggtttttctgtgaccaccttccctaggagtgagggacctggctgaccttggcctttgcctcaggctggacacacagcggtgctccgtggatgtgagcttaacatctctcgatctccagcacttgtgcagcatttgaacatagtaaatgctcagtaaacctttcagaacgggtcttgggaagatctgtcaatccctaggccttggtcctcgcaggagctacaggtgtgggccagaggggagggggacctgagagcagagcctccaatttaaatccaacttggtgtcaaaaaaagtgcaaagcgatttctgtgcgttggagggtagagtgtagttgaggcttcaattgggaaaaaactgtgggaacaggggacaagtcctaggatcttatttgaggattgtcacatcttccagttggtgtgatggttggggtgggtagggaatcggaggggaagagaggcaggaaaggtgggctctttgattagcctcaaggaacattggagggagggaatatttattgttgtgtttggtccagattctttttttttttttttaaagattatttagtgttttattcctgagagacacagagagaggtagagacataggaagagggagaagcaggctccctgcggggagccccatgtgggactcgatcccaggaccctgggatcacgacctgagctgaaggtggatgctcaaccacggagccacccaggcgtcctggtccagattctgaaaagagctgagaggtcaggactagcgtggacctgaccccgtagtggctctctgggttttgctcaccatcaggccagggctgctcgctccaccattccatccaatccccaacctcccctgaaaacttgggcacccccttactgtgggtaaccaagaccaagggaggtgtgtatgtgcttgtgtgtgcattttaggaaaatacacacaacgtaatatttactatcctaatcatttttagatgtacagttcagtagtgttaagtacgttcacgttgttgggcagtccatctccagaacgttttccatcttgcaaaacaaactctgtgcccattaaacactaactccctattaccccttcccccagcccctgacaaccgtcattctgtttttctgtatttacaagttcgactactctagggacctcatagaagtggaatcgttcaggatttgtctttgtgactggcttagttcacttggcataatgtcttcaaggttcatccacgttgtaacatacgttaggatctccttcctctttaaggagggaaatgtatgtatatgtgtatgtatgtctgcatatgcatatgcacatatataagtttataccatattttgtttatcctttcatccatcaatggaccactgggtggctgttctgaataatgctgctgtgaacatgggcgtatagacacctaagggagagtttctcaggagcctctttggggacagtcagtctcatggctgagctgtgtgttgatggggagcagggtagagcgatggtcactctttagatggcctctggggaaaggaggggtgagggcctgagtgtgaagggtgcatgctcagggaagcagggaaaacgctaatgagatgtggggaagatcaagatggcagacttaattcacttggcaaatttacagtcatcttggatgtgtcaggcatggatgagattgaggggaaggggagcaggagttcccagtaggcatgtgtaactgggagaactggtggtaggtactatgtcatacatggaaataaagccagaggaggagcagtccggttgaggggaggaagaggaatatggtgtcggactctgttgtgtttatttattgactatttacaggccacatttccttgaaactccatttcatgatggtagatacaaatgggatacttcttagggtcgggtccacgtaagagcaaaactgtgccccagaagtcaacaggacatggctgtgtgatatgaatggtaggatttggggatttttaaggaattgcgtgttgtgtgtcagtcatacaatgaaaggtaaattttcacgaaaagaaatacatagcaggaggataattctgcatttattctccacatgaagccattttccaaaagtgtttgttggttttctcagagaacagaatggacagtgtgggtgtgagggaggacagagttgattaaagctttggcaaataggccctttgaaggcaacttaaagaaattggatttattaagcctggagaagataaggtgaggaagttttagggaatgacagtcttcaaatatttgcaatatgtgagtgaagaatgggacaaagtgagaatagtttaaattgccccagaaggaaattgagattttttttttgggggggggggattcttgattggagctttggaaaatacgttattgcattgccagagctagttatagggtctttgctgcaagtatgaggagagtcagataattgtcatttgaaatggttaggtcctgcttacctcagctggtctgacgaccctttaagggcctgtctgaaatcgtttctaaataaaatcaccagccacttttttcttctttcctgccttggatttggggagagtgtttctctaaattctggttcgactctaacacgatccaccactcttcacagtttttggccatattgaaaatagccaataaagaacccacggcttaagcctgggttattgatctcttagggtttggggctatctcaccagagtggatcatgcagctgtgggatcacttaagccaagtgccaaagtaagaggaacaaaaggaagtccgaagtccagaggaatctataattgatcataattcaccctaacctgagaaccactgtgctctgtgatccccccactgataattttgagagaaagccagccgtgctgcagctaggcccagagatctgtgaggatgaaggaagtcctttttccttgattgctcaggggtggattgctcgcccggtggcttacccatcacccagacttcccttcccacctgccctttcccttgggtcatttcatggtcatggctcaatggcacagatcagatcagtcagccgtccagtagggaggacggtagaaatgaaattgcaattcaacagcttccagttgattatgccatttcacttgtcatgttgaaatgtgtgatgatgctctgagatgtgatccctgccttgaaggagcctgggagctatgggaagataagggctggggtcggtgctaatgtaataggatttgtaataagatttaaataccagtcctggaccagaagccaggatgcatattcattaccactggattagaggcataggcatcccttctggaggagagaggctgaatcagaggaagatgtggggcctgagttaaatctcggtgaaggcatggggtaaggtgtgaatcttaaaggaaggggtttcagctagccaaaagactcccatggaaagaatctactggaagatgagctagggtaatttctgaggattttttttttttttgattcgtcagtaattgcagtatttcctccggtgccatatgtgagatttttgtcaagtgtaatctggtcaggtagttacttattcagagaaattaactttaaaaaatggaaaaactacagactttccttttgcatgtattacacatgatgcatgtacaatgcaaatccagagtagggccacggatacgtattttgagtcgcttttaagtccaggctaattaccctccctcaccttcctacctccccaccgccagccaagattacagatttcataggctcaacgtcccgtagtggcactagatggttttttggttctttacttattagcagattttaaatatttagtaaaatgataatccaggcgtgtggcaatctgcataaatccattcctttaaaaaaaaaaaaaaacccactccaaaaaaaccaggaacaagcaaagcctctcaaccttgataatcaacctctcctgtagggtttaggacatcttgaggttctgttctgggttctccaccctgcactagagggcattgggaaggtaattgggggcactggtttcctgccctccccaaagcagagagccttaggtgaggaggtggctgttggtgagaggaaaagtcaatcacttaaagaaaaggtgtgaaaaaaaaaataaaggtgtgtgatggcactcacctgggagtgcctttgttcctgaccaagtggaaaaaaactaatagggaaatacgaaaagaggagacaccctcactccttcgcttgcatcttttaagttcccgagtgagttgagtgagtgaggcaaaatacctagcttctttgggatttttaccccagatgactcaggttatttcaaagggtgttagaaaattcttcaaaaacaatcccgggctgccagtcatttacatagaatgacctatgtaggtaggctggtaagctgccgcagaattgcttagcagagttagaacaaagggggtatcatcacaaagaattttggggattatttggtgtgtctttttattggaaggaggtatttatagaaaggtttctaatatagatttggcttctggggaaaacactggcgattttagaagtgtgatggggtggggaggtgggggcattggctctctgttactgggctggcgcatggtttgaaagaaaacaagagcatgttaaaaaaaattgagaattcttctacttggaaaggctatgggtacttttaaaccgactcggtcttttggcttgtgaagtgttttaaatgcatttccattctgatttccactgatttctcttttaatgggtgacgttgagtccatgtaccttgggaagatcttcgttttaagaactggcctggtaataaaaaccacacagggtggtcattaggcttcttgtcattgttaaatgaaacccggattcttaatccaaaagatggcattagaagagccacttgaaaaggtttaattgggatgtggaaaaatttttttttctacttatagtatcgccagggtatttactgcagggaaatagtagacacgtttctagctcaacccaaaggcatcactttcataaaaaaaaaaaaaaaaaaagaaccccccctcctcttttgctttttaaaataaactagcatatgtagaagggtttatgaattttttagtagatctgaatgtgtagcctaatttacatttgcgcattttcaagggatattatttaaatgatcaccttaggtttggaatgactgccttccaaagagaggctggccaagggagggggatgctggagagccgaggtggtggcgggccagcaggtgaggacagtccttagcagggtgtaagccggcttctgtgtccctatgggaaatctggaccagcagctctatccataaaattgtaggcttatgactctgtaggcttatgactcagtttcattcccttgctcccttctaatatcttttaaactgaccttttaaaataaaatctttttaaatttaatttttaaaatttaaaatttaagatcttttaacattcataggttggctcatccaggattgttaaagcattgggggagtggggagagcaccaagcaaaaatccacatcatcttggggcttctgttccagtgaattctttttttggctcatgagcccaggccccacaaagagcccagaaagagaagaagaaagcctagggtctctcatagaaagcggcttcatatagatttatttcagttctgtgttctggtcacttagggaagggagcagagaaaggtaaaggtttctcagggggttggggcggcctgggttcacgaggaaggaggagggactggagaaggcaaaccagaaggggaaagaggagagacagggaaggggcgaggggcccagggaaggggcctccagaacaatgatgagccacatgagcaggttttcctggaaggacccaccggctggaggcttggaatcattttctcagaatgtaccagaatgctttttcacagctgagagagatcctccaggggtccaagcctgagtgctcttcaggtcatctccaaggactagaggctcttcacctcctttttaaattcagccttttcttgttaaaatcggaccatctttgggtttaatgataactacgatccgccgatggcagcttgtgtcgactccgggccattcagcccaggacaggtattgggcgcatcgtgtgccactctcatgtcaccgtaggtggccggggtggggtggcagcagcttggcttcaggtgactctgcatagcctgagagtggcctctcaaagatccatgaagtgataagctctctagttttcaaatctaggactcccccaaatgagaattactgaggactagaaagttccttctctgtcggtttcttgggcatcgagtaggactgttgtcacctttggtatagtgtgggttgatgctcaggaaggaatccaagatacagaccatctggcgatggaagagtggtacccctgtgagttgtgggcaagacggtgtgaccccagtgaccacagctttggcgggaaggccttcaagatttccccaggtgctttgtagggtgtcagctaacaattttgctgagatgaccagctttaagatatacaagtgtgggtccttaagtaatgatgggacccgttgctgtcatatacttgcttcacgtttgacaaaagactggtgtttctaagtcagggaattatttttatccagtgtggtcggtcatcactggttagttcccactgttttgggtgagaatttcagggcctagtttaaatagatcctgtttaagtttgctatcagttaactagagaagggttaaaaaaaaatgtagggggcctggaacttttagactattccttgggttgtctgaaaacctagtagtagccattttatcttaagatggagcaattgaggggcacctgggtggctcagttgcattagcattccactcttggttttggctcaggtcacgatctcaggatggtgagatccagcctcatttcaggttccgtgctcttcggggagtcagcttgagattctctccctctccccctccctacccccctgttttgacacatgggttctctctctcaaaaaagaaataaataaaccttaaaaaaaaaagatggagcaattgaacctcacattaactttaaaatacagaggcacccagatggcttagtttgctaagcatccaaaccttgatttgggctcaggtcatgatttcagggttgtgagatcgagccctccctgcttaagatgctgctctctctccctctccctcaaaccctgttccaggcactcatgctctctctctctgaaaaacgaaaatgatatatgtgtatatacataaaaattgatatatctctacatatctaaatatataaagcacaaggctatttcagacctaggtaatagtgtaatgaacttttctatacctaccatccagcttcaacagttggatcagcaagcagcgttttctgtttcatctttgtccacttcatccttccattatttcgaggcacctctcacgcatcatgggatttcatctagacatgttttcagtatgtagctctgaaatacaaagattacccacgtagtgataatgccagtgtcacagctttccaagtcaatgtatttcccacgatgttgttgattacccaggagtcacagttccctgtggaaatataatacctataaaaatatgtatgaaaataggcacacacaccaatttgtacacatttgatacagaatccaaatgagatttccatattgcagttggttcatgtggtctttaagtcatttcttatttatttatttatttatttatttatttatttaaaatattttatttatttattcagtgtagacatagagagagagagagagagagagagaggtagagacacaggcagagggagaagcaggctccatgctgggagcccgacacaggactcgatcctgccctgggccaaaggcaggcgctaaactgctgggccacccataggtcctattcccccatttccattgaaggaactgagtactggtcctgtgcaggattctcttgattcttctggttgcatccccatggtgctggtgaacaggctctttgttccctgtatttcttatgcatttgtgatttagaggtttggtcatattcaggtttgatttttttttttttttcccctaacaagagtacttaataattggagtgttcttctgttagtctactttctttctgctcttttggtattccttggggtgctggcaaagattggtattttttcattctgctggttgcttttatgctgatacttttctataatatccttgtttcactctttggtagtagtggtggggtgctattttctattggtttcctactgtgagtaacatttaaattagctagaagcctgttctttcttctccctcccccacccccagcttggcatttgaagtcatggcctttcatcctagttactatctatacaatcggttgatcatatactacttttcaaatgcccctccctccctcccctaattttaatgatagctgtactaaaattgctttatcagaatatatgataattacatgttctcctctcttctttgttactgctctgttctcctggtaaatatctatttgatgctggcccctggtccttatgtcctgtctttcctggctgtttgtttttctgaagctcatcctctctgctagatgcttcaggaagcactcatgggaagtatttcctgaattacatgttcacaacagcttgtcggtcacctttctacttcaaagtcaggttggctgatgtaaaatccttggctcatgttttctttgctcaagtatctttaatattttatggtactgtcctttgccataaagtgttgtccaagtctgctgatactctgattttcttttcctcacgtttaacatggtaggtttgcctaaatacccaaaggaatgtgttttgcttttattctttgaagtccagtagtattttacggtgtcggccactctgtgttgagttttctagtcacataataatgctacttaaatgtgtaattactcaggaaagttttcttgtagcatagctttagctgtttgtcctatacttttttctttggcttcaggaactcccattatatgtgtgttagatcttctttgcctgtcttctatgatgatcactttctcccaaaacctttcagtgtcttcattatttatgtgaattaaaaaattttgttccgggggatccctgggtggctcagcagtttggcgcctgcctttggcccagggcgctatcctggagacccgggatcgaatcccacatcgggctcccggtgcatggagcctgcttctccctctgcctgtgtctctgcctctctctctctcactgtgtgcctatcataaataaataaaaaaaattaaaaaaaaaattttgttcctctccatcttccagttcttttaaggcacaattcattttatgtgctgtgtgtgtgtgtgtgtttaaaaaaatttacccttcatttcttttacttcttttcttagttcttttcttggtttcttcactatctccactcttccattctctccagtcaactaatttctgggttttaaaacttcttacgtggttctttatagcttctttgatttcatttcttttagcttattttgaaataccgggttgtagtttacatctgttttccttctttctggcatgattttattgtctgtactggggatgtcattctgctccttattttttctttaaataactttggaattcagctgtggttcctttctgttgctcactatgagttttcctgtgcttttagtggggccagtatagctttcctagtttcacaattctggagtaccattaatgtcgttttcacagagtggtatgtggactccagttttcgaaagtctaagatgttacatttttggttcccattcccacctgcccacccaacctttgcccctgttttgctcatcttagattcatcctcagcagtttctcctccatacgggggctttctcctctcttgttttttttttttttttcctctcttgtttttttataagaatcaatcctccccccacccaggacattccagcactgagacatccgtgggtcacaattccctctgcacttacctagtgaaattaaaaactgtaatgccatctgccagtttgtagggggtgttctcagaatggctctctgaaatttcttgaagctgttggttggttttcctcatcttgtcatatataggattggtgggaatactctatcacctgggtttgttgtagatgttgttcttggggttttggttctgctctatttgtcttttttttagcgttaaggtaggtgcaggtaggggagatccaataattaggctactaccactgctgccaccttgccagaatctgcatagactttttttttcttttttttttaagatttgggggtggggaaagtgggagaagcaggttcctcgctgagtggggagccagatgaggggctcaatcccaggaccctgggctcgtgccctgagccaaaggcagacacttaactgagccacctaggtgcctctacatagactttttaacataagattcagtaactttttggtctaccaaattgggaccaaagtagaaaagtcttgaaacatcactggtagctgactttaaaaatattttttcttacaaaataagttattaaaaatgtggtgtagagagaaaagttagtagttgtagctatctgaaaaccagaactgaacacttcatggtctacctagcattagctttctaagcttatttatgacaaaatgtaatggttgaatcatcagagtaccaggaaactcatatctgagctattgtttctgagaaaaacatacagaaagtgacacacttttgccattgtttggtgtaatattccttgaattgtgaaagagagaatgctattttatggttttaaaagcattaaaccacataatatttttaataccatctaataaagataaaatcattacttaattaggtgcatttttcactttcagctttttttctcctgtgaaaaattcacatatctttaattatagtcatttgaaaaaatatgctcccagggcttgatgtaatattaatttaggtttccaaaaatactaaatttctttcctccagcttgagtttctttcaactggccattgatttaaattacctactagaaggttacaattttagaattggcctctttatccctcctgcttttaaggatagccatcattctaaagtcatataaggaagtagtaaaactttctcaacggacatattggaaacttttttaaaaaagttctggaaaacatagtaagatcattttcagacatttcctcttattttctacaaagagatgagaagaaatcattttgaaaacagagctggtcattaagaattctttgcagaagggtagccagcttaatgtgttgttctaagtgaatgtcacccaagaaaaattaagggaaaagtgagcactcattaagcaaattgaccagcaagtgttctgatgaatgtcgcaacaaatttgaataagctaattttgtccattagtgtgcttttaggaccattgtgattgttttggtctaattattttttattttgtttattcaaatgtagaatgcagagttaactattgcagcaattttctgattagcaatttagaaaattggtggatggtatctgactcctcaccaagaaatgtctggtatttgatagggccatgtgcaagaacacgtacggtctcgggagaagcctgtgctgtttgctctgtttctcacccgctgcaaatgggagctcagaggcccgcactggattagcaggggctgtgggcttgggctcggggccctcagatggagtgcaccagattgaggtctgatgtgctgcagaagttgtatttgccacccagtgtcactatttggagtcctgtagctgtgactggtgaattctgcaacatttcccacttctaaagcttggggattcgagaaatctggtgcccgagtggctgccaaagcttgtcagggggacccagtgcgaggccgatttctaggtgtaaaagccaggcagatttgctcactcaagaaaatctgtttttgtaggtttgctctgacttccaagatacagatactggtaaaatttttcttttcttttcttttcgtttcattttttttccttttcctttctttccttctctgtctctctgtctctctctcttattcggcactaatgccattcatgggtttcttttggtagctgatggtcttgtggggttgagtaactgcttctccaagtgtggtcctggaccgcagcaggggcatcacctgggacttctcagaagtgcagactcttccctcccccgcactccccctcccccgccccagacccactgaaatgggaagctccgggaagggcctcccagtccatttcaacaactttccaggtgattctggtacaggctgaagtttgcaaaccaggagtctatagttactgggccttgtcacggcgtcaggcagtgataattgaaaagctaaagcgcgtgtggccttgtgagtgccagaccagggtgcaattctcagttctctttctgttgcactaaaaagatagatatgaatttcggttagtgcagacaggaaaacagacaatcgcagtgctggcggacggtgcctgagtagaggctgcagggggccttcagaacagtgcatgtgccagagcgagaggggacaggaaggcccctctagaggtggtattgtattgtattttaatttttaaaggttttatttatttattttagagtgagcacatgtaagtggggaggggcagaggggggagggagagagagagggaaaaagaatctgaagcagactccccactgagtgtggagcctccctgggctcaatcctgggatcctgagatcatgatctgagccgaccccccaggaccgaggtcatgacctgacctgacccatgacctgaccggctgtgccttgaggtggtattttgaaaggacaaatatgaccatgcccctctctgattaaatccaggtagatcccactggaggcctccagggtctccttcagatctatgttttgcacacaacacctgccttcgctgtccatgctttcttcaccccttccaggtatcctgctccttggagctgtggcttctgcaggagcctcccctctgccagctgccagggaaccctgttgcctccctggttggtctctagtgcacttcagattgcaactggcttgttgcctttgcaatcctttccgaccccccagtgtgggtcaggtcagttctcactgtacagtgcacttcatcatactcatcacattgtaattatacaattatataatgattggtttattcctcatgttcatccctggagctcaatataaattccaagagggggacagagcttgcatattccctgctgcccaagggcccagcaaggagcaagcttttagtaaacattatcagatggatgaatgaaggaatgaatgggagggcacagtcctctttttatccctgggtcataggactggataatgtatgcatttggagagaggtgtcccctaataaattttacttatgggatcgattgtcagcaccatcgaatcctaccactggactggcgagccccttgcacagtggcagcggagtctcacaacctgattctaatctggggtctgatttttgggacatccaagaatagaagttcttgagtattactatcccaggaatatgggaaagaaggagagagatcatatgatcttggagacgttcatagtacatgtgctagaagccagcagctctagtggaggaagtggcacctgagaagttctcagggaagcgactattgtccccactcccctcaagagcctccaagaagggggctgcctgctttgctaatagagtttgatgctggggcactatgtgtcttcccacccacttccaagtccatttaatagaacagagatgtccttctttgccttattttagtctgttggtcttgacctggataaagtaagactttttatttctgttccagaaggagagagcatggcatttgcttcccagaggcagtagcttcaaggtgggggcatctgtttcgtataagacaccaagtaagctgtgctgatatttaataggattgccaagagcctgcacgtgtgtagtttataaaaatacatacatggagaacaggggctcaatttttctttctttctttttttttttttttaagatagggttttcaagacctagagggtaaagatgctgacatgcttatgggaatcttgctattaatagaactgatccgttgcctatttgtcaagcatagttggttgttatgctgtgtattttttttaaattttttttttacatctgaggcttaacatactcttagacctattgtaaattccttttagattaagcgaatgtaataaatgcaatgtgttttgcaacaaaaatcataaacacaatttctcactcaaacagctacatcagaatagctgtaatctgctgagctggccaggagcggggatggcacacatggctgtaattttatgttttggtgcttgtgtcctttgtttatcagatgccatcttccctcctcaactgtggttcattccccatccctgctgcctccccctgctctcaggcccattctggttccagcctggctctggtgctttctctgggtctccctcgccctcctttgttgcagccaagtcatcttagcaagtgatttgtaacaggaccatttgcaactgccaggtacatgcaggatttggagacgaggtcagaatcttgaaatattttgcccccagtgagatacatgagaactgaggcttggaaaaggtcaaggagcttccccgaagtctcccagagcttggattggaagccatgcttgtctgcctccaaaaccaacacccttttctcattccatccctgttgcacctgctcccagaggctcaggggagcaccatcacctccagcctctgagctggcttcaagccttgaaaatagtgctgaatcaagtcaaagaagttgcaagatgagtcgcaagaactccgggatacccttcacctagactctctaatggtcaacatttcgacacatttcctttgtgtatatacatactatattttttctgaaccatttgagaataagttgctaatatgcctccctccctgaagagccctctgaaggcaactctctctctgctttgtattttatgagagcattgagggccacccagaacgactgactgccttcttctgtcctcaacccaagggtggttccctctttcttttagcatgggaccatgactccaaggaggtacacctctgagctttcttgactttgccctcaactagaccctaaaagtcatgcaccttcccggacactggccctctctagcacctgaaacccagaacctgttcttgacagggcactacaagggcagatagagaggggctttttgtatgtttctacctattttatggcaagggggacagggggggattccgaatccctcagcttgttatccagacctgcagctaaactgtggtctccgctagttcaggtctgtttgcaaagacagttatcaatgctgctaacccttttctctggccactggctcagataaaattcccttaaaaaaaaaaaaaaactacttttgtttttacttcctttggtgtaaaccagccctgtggctagaaaacgacattttgaaagtggaaaaagaaggaaaacacgttctgtccggtttgggtatgggatggaggggaaggtgcaatttccttcatccgacaggtccattaaaagcaggatttggaatttattcatcagtaaaacttactgatttacccattatgggggaaatcagcttaaatatccatttgagccaagcataattcctagcattttttataacttagacaatcagggaggcctttcagaagcgtagatccacgtttgaagacaaggtttaaaagatgccgtaggaaaacagcccagatgtcaggatgaatggatgaagatcaacggggtaggtactgggatggaatgttagttactccgccttaaaaaggagattttgctacatgctacaataccgaagtactttggagacatgatgccgatttaaataagcagggcaccaaaggacaaccattttatggttccacttatatgaggtttctagaatagtccattcgtagagacacagagtagaatggtggttgccagggcctgcggggaggtggtggtggactggggagtttctgttccgcgggtacaaagtttcaatgataaaaaagctcccgaggtggataacagtgttggtggtacaacattgtaagtgtatttaatgccactcagctgtatcattaaaaatggtaaaaatggtagattttaggttcgatctaaagcaaaattttcaatgccccactggggttatctttctgcttgtgagccaaaccccctactcattggcattttatttgacgtcattagaattagatgctgtggaattagaagagagcttatggttggcaggtatgtattatgtctttgcattttcagtggctgtgagctcagcctcattccccctcctgaacctgggagttgcattttgaggagttcttggctcctgctgggaggaaatggtatggccacacctgcccacactgctcccaattcccaggacgatgctaaggtgaaggcagttgatgcccaacaggtcctcctgcaacttcttgcgaggatctgggccgtgcagcctgaagggtcggccttgagatgagacacccacatgtggggcgcctccttagagcttggtgagttttggggtagagctggccactgactcgtctggtcgatgacattccccatgctctttttgccctgttccttttcacgtcgttcctcagtcctttaagttaaggaagttcaagttgaaagaagtcaagagctcccctgccccacccccaccccaaaccccacagatggcgagggtcttgtggtggttattgtattcaaacccttaatgcttcttatctggttccgatttcagtgagtgctttccagaactcagaaacacggaagtctgcgtatttacaacaggagctgtactgggctattgggaaaaccccccttggaaatgagaaagttcctcttttctgttgcagggatggatcctaatatatcgtgcttgtcaaatccagaccttatctgattccccaaagaccgacttcataatggctgagaaaggtttcctctccctgtgtgtctttgagatcaaaagaggaagtcctgcttcctccgacactggcttgtatttttcttacagtgagtgagtaggaaatgcattaagtcgtcctatgaaagcctctgctgctggcgagaagaaattttgcaaaataatcagctgagaagggcctttcttccagggttgaatgatctgtacctttccacacttcctgtctccctctcccttttgaaagattttatttattcattcatgagagacacacagagagagagagagagagagagagaggcagagacacaggcagagggagaagcaggctcctcgcaggaagcccgatgtgggactcgatcctgggaccctgggatcacaccctgagctgaaggcaggagctaaaccactgagccacccaggtgcccccttcctgttccttttataagatgtgagggccagggatcagattccacgtctaggcccttattctgttgttcacacagtagttttaaaacaaagtaagtgatgagttacattatttatgtcacaagagaatcactgctcttcattcttgctgcagtgaattgagtacctggtctgtccagccactgttcgggatcttgacccttgcgtggcctacgtatttgataacagaccctagaatcctagagcttctgatgacctcttcataattttttagaagaggacacggaggcctagagaaacctcagtgacttgcccaagatttagaatccagagctgcatttctccaccatgactttttttttccttcacacccttccttccctgaactgcttaagagcaaaaacaggctgttatacattttatctaaagcctacaaatattgcatatcgtagcagagaccaaacaattaataattttgctagtctccttcaacctgagcaaagctttcatagatgttgtatcttgaaaaggcatttaccggaagtttgaaccttggctcctaggtcctcttagtgtaagtgtcctaagaggcaagcagaatgtttaacatctccttgatcttgggggggtccttttcaaacatcagagtcagctcaaggggtgggtgtgggggtgggggtcttctcttgccatcagatggcatgcttgtgaatcaggacctagtgacagggagggatccaggctctggctacagtgaagctccccgctgtgcggtgttggggggacctgagtggcaggtacttaaaggcagaggaccgggcgtgcagactttgaccagggatcccggtaacggccggaaaagcagcgaatgcaaatagtgcaacgggaaaggtgtgctccacgcaggtgattgagcaggcctggggttctccaggcacgcaccctaccggttccgcggttaaggcagaaaggagaggagccggcccggcccccgagaggaaacgctctcagttgcagaggcaggaagggtccaaaccacaggtgaatcnnnnnnnnnnnnnnnnnnnnnnnnnnnnnnnnnnnnnnnnnnnnnnnnnnnnnnnnnnnnnnnnnnnnnnnnnnnnnnnnnnnnnnnnnnnnnnnnnnnnnnnnnnnnnnnnnnnnnnnnnnnnnnnnnnnnnnnnnnnnnnnnnnnnnnnnnnnnnnnnnnnnnnnnnnnnnnnnnnnnnnnnnnnnnnnnnnnnnnnnnnnnnnnnnnnnnnnnnnnnnnnnnnnnnnnnnnnnnnnnnnnnnnnnnnnnnnnntgggcctttaacccaatggctcatcccctaagcacatgctcagccccaggtcaggggcaagaacagcgcaccagcctgtggccgggatactttctggcctcttctgctggtcggtcctctctgcctgcctttcaatcctctttgctctttgtgatcctccccccacccctgaggatgctcatcaccccccaccccccactgggagcccttggctcccctgctctccagctccgagagtcctccctctgctcctccccctgcccctggctggccccgacgttgccctcccccagtagcccgagccagtcaaggctccttctcccacctggcaggactgtggcaccgtgggagatcctggtgctatgggcatggggcgatgtcaggggtgaatgtggggtgaacgactagggttgtcaggagggatgcaggacacgccatggcctgtccttcctcatgtcggtcagggaccagtcctgtgcgcggggggtggcgggcctggttctctgttcacttctgctccctgtctctacccaactccagtcaccttgcacctgtcattccgttttgggccatctctttgtactctccacgcccaccctcgatgatcttatgaacacggctggttaccacccctcgcccccctgcattgcctacagtgtgctgcggaggacgttggtggccctgacaccggccaccacccctggcttgatctccaggacatttcagtgcctcccactggtccacatatgcatctaaacctgttcttcctcttctcttctgttggcaccccgtctccccatcacctaagccaaaaacaggtgtcctctcttcttcctctcactccttcactgcccagatccagcccagacccttacccatcagtcctaaccctcactgttccctgaggggttccccccaagcgcacatcagggtgggctcacccccttaactgtgacacagggggccctgagatgatggtgccccccaggacccgtggcctcacaccctgatgctgcagcgattctgaacgatcctgtgatactaggcacacaccttactaggtctgggatagttgctcttgcggttcccacacctaatagacctctctcctcctccacccctgggcttcaccacgtcacacacattctttaatttgagctttgggaatccttttctgaccctcccgcggccccagtttcccctgttggctgtgctggcttgcttctacggtgattatctctgagtccatcttccccactgggccccaagcccctgctctgtattcctggttcccagcctctcccaggaccactggtaggagctcagttaccggttcatcaatgaggacagtttgagaagtgcctgcgttgttactgatccgtctctctgccagtaatgactaatgctccagcttttatttccctgtccttcggttcccttctgtcaattagttcatcatcattaggccaacgctggaatacacttaaggagctgcctttttttttttttttaaactgtgtttcagtgaagtctttcttattttgggattttaaactgacttccaaatggctgatcattgtacaaggcttgaaaactgtgaaccgtctccaatactgaaacacgtcttgtatgattttgtagtaccgagccctggcccgcaaatagaaaagttgttttgtttttaaggactaagtacaaatttgcaccgtgccaaggaattggtttttgagtccacggacacaggactagggcagtgaaagacttaagacagtgaggagatcgtgtcaattattagtatttacctcctgtctgacccgagtagattttcacaatgagctctttctgggtaagtgctttaatctctgtattacaaggttagagatacatctgaactcccccttacccagaaaatcctttggaaacagcagagttgtgaatctggaatcctgctatgcagtaggggactgtttaaacttgtccatggaggtgctgttaaaagttagggattggggtggtgtgtttgggaggatgtggctggaaggtagttaagtttctcggaaagctcatgtttttccaccagaatttttcttttactttccatattatgatagatagtataaaagcgtttaaaaaatgatttgtccctgcaagaaatggacctcccagaagacggggtgaaagcacccgagatcccgagaagcactcctctgtaggatggtgttccaaattaccttcccctgtcctgcacctccccagttaatatatgtagtaactctgtcaccatgcatttattgtccccttccatatttctggtgctctgtgaggctttggggatggagagagagacacagactttgctttggattctgagagcttaccgtttgagggtgaggtaggagcaggagggggggtgcttgtagggaggagcttttcctgactaccacacacctctgcactcagagagctttgcctttgcctttcccctccttgattacacataaacatggacacatgcaaatggaccaagtcttactggcccagctctcagggcccccatccctctggacattttcatggtgctctaggcgaagagtagccgctccttttgagtcctggaatgtctttccatatttttatttcatttatattgcattggtctctgagctcctccatcagcatctggttcactaccgatttaatgattatgcaacagatgcatggtgaagccaaagatttcagtgcttatggtagcatgaactcaccacagtagagtgggggccattctgggatcctccgttgcatggcttccttcactctgtaagggtgatccagagtggatttacagtgccaccccccaccccctctctgggcaagagcttttttttttttttttttcagatttgtttggttttcactgagctcatactctctctcttcccaccccagctttattctatttccagtatcatctacttgtttttaaagcctcatgggtgttgtgggcaattactaggatccttccatcttggtttttatccagtttattcctgtggggatctaaaagtatgtcagaaacagtaggatatacaaatcatgagcttttttttttttttttttttcttttcctgaatcacaaattgtggttaaatagtgcatcagaaaggatgaattcctaccatttacttcgacgtggatggaactggagggtattatgctacgtgaaatatgtcaaacagagaaggacagtcatcacatggtttcactcatatgtggaatataagaaatgtgaaagggactatagggaaggagggaaacgaggaggaaaaattagagaaagacaaccagagagactcctaactcgggaaacaaacaaaaggttggggaaggggaggtgggtggagggatggggtaactgagtgacggacactgaggagggcacttgatgggatgagcactgggcattatatattggcaaactgaatttaaatagaatatttaaataaatagtacatgaactaaagagtagttggactacaatggagcttggagctttgtctttgctataggtccttttctacttcctcaaaaccagaataggcctctctacatgggttttcctccctgccgttattttacctggttccttatatttgtgtccaaaggagaaaaggttttgaaatgacttccttacttttaactccggctataaatccagtctttgcagcttagacatttgtgaagtgcacagaccccttagggcgggggggatctttgggacaagatttgcaataataatgggtggtccagccaccacggagctgaccagggagcgccttgcactcaagcaggtggctcttacactggtcatcgagaacattctataggaccagcgcagcctggactctcaattagtcttttaatcgacagatggcaaagatgacaggtgtatcttgaatagtttattttcccttaagaaagatggacagctgtgttcattttgatggagaagcagaaccttttctttgagttttggttgactttgagtttgggatgaggggcgggagttctgaccacacaccacacccagaatgcaagccagttctgcagtttctaacttcagtttcctttagtatagtgcttatgaaatagcacttgggataaagagcccccctccccttgggggtaacccccccccccaggcttctcatgtttcaatcccatttaattggacactccatttagttgagtcaccctttgagggtttctttgttaccagagaatcaacagctctttttcagcgtgcacacacacacacacacacacactcttatttcatcaatttttataacatgcacttaatctgtatatataatacgccacaagtctagcttctgtagacagtttgagaataagaccacgtgactctgatggtgcaagcaggagagcagaggtgccagagagaagaacctcacagtcttgagcactcaaagtcccccggtttaaaacttagagcttattcagcccagaaagttgaaagcacttttatgaatgcctgctttgtgtcaggtagcggagagatgggaaccaagatggtatgcttgcccgcaagcacaactgtgtgggacaaatacaaataatgacaacaattaatttttttagatggtgtgatttaaaacaaaggcagggggctcactgaggccaataccagaggtcagaggagtcagctaagaaagagccaggagagcagagcagctttgaggctcaccagccagggctttgaagaattgttttttgtttaatgttagggtttttaaatttattttaaatttttaaattttttcttaaagattttatttatttattcatgagagacacagagatacagagacacaggcagagggagaagcaggctcctcgcagggaacccaatgtggaactcgatcccagaccctgggatcacgatctgagccaaagacagacgctcaaccactgagtcacccaggtgcccctagggttttttttttattgtggtaaaatacacacaatacaaaatgtaccatttctgaatgtccagttcagtgccattaggtgtattcacaatgttgtgtatggaaattctgtacccattagccccattaactttccattcctccctccccctgactcttggtgtctacattctactttctgtttctacagatttgtgtactcgaggtgcctcatgtaagtagaatcatacgacatttgtccttttgtttctggctaatttcacgctgcaggatgtttttgaagttcgcggatgtggtagtctgtgtcagaatttccttccttttcatggccaaataatattccattgcacgatcttgccacttgtccatccattgacctgcggatgggcacttgggttgtttccaccttttggctatcgtagataatgctgctgtgtacatgggtgtgccaatatctgtttgcatccctactttctcggttctcttggatatggttggattttacatgagcgaaaggggttatagagggtatgttggcatttatcgtgatattgttaaactcttgcaaccttattgactgttcataaatgctcctgttctcccttattgttctttgagagcacggactgccttctaggttcagcccttagccaggtacctgggataaatatatcaatatttgattagttcctggaattcttagtccagaaccatcatatgctctagtagttggcccccagaatggtaggttttgccatctatcttgttttcttttttttctggctcattaattaacatgtgttcagggaatagaaaacgactcttaaattagccttagccaaacataattagagaagtacattttctaatgcagagactcctaatgtagataaaacccaattcaacaaacatttgttgagaacttgctatgtaccagacacctttttaaaatgtgtaatttcagggcaatttctaagctcagttggaataccttattggtattgaattttaaatataataagggtaggtacatactttttaacatgaatctctagtctttattgtaagagcttcataacaacattcaagatagtttgggaaaaagagaataaataatacctagagtcccattctaatataagctctattttcattttataggatgagtttgagggttgaacttataagtaatttactttgaaaataaaacccttaatcttttggtgccaattatcttaaaatttattctctaaagctctagaggtaaagcagaaaccaatgacctcaagttcggaggactcttttttagaagcatccatagcaggttaatggatgcatagaaccccactcccttttcttagtggaacaccagaaatgacatctgtcctcttttggggataggtcagtggactgttgacacccattacaggggctaggtatttaggaatctgtccttcctccgatcttttctatgttcagggattgaagggtatgtttttatggcttttccagggggaaaatacaatttaggatccttggagtaggtggaggaggtaggacttagatttagaacacggtgagcatcagaacaaacatgggtgatggggctggacatgttggatggagttagtgagggcaggtgatcgtggttagggaccaatgcctatgaaaaacagggctttccacatggcaagaaggtgaattggtggagtagatgtgttctggggttgggaatgggggcgggaagatgggcccatgaagggatggaattgtttataggctccttagcccgccagcctaagactctgtcttactggagagggaggtaaaagtccagaggaagcagctagaaactaagtcccatgcaggtgctttgtgagctatccatgaggtcagtgttagctgctgctgcctctgacagagatttttgaagctgggactggtgttgttgaaggacagtgttttttttttttttttttttttggcctgatggatctcagggctatgaggtttgatgagttgggagtttgatgagctggaagcacagaaatctcctaggagaagatgtcatctgtctgggtggtagtaggtggctagtctggggtagggcagcaggagaggaaaggcaggcaaggatgagaggcagaggctccaaaggagaaatggctgggatttgctgccaaggaggcagaagtcaggcaggaacccatttgggaaatgatggaaccgtttacattcatgggaagtgagtgagtcaggactgactggaggggtgataagaggttctgtttttagaaaaattgtgtctgacatttattatgtattttctacgtaatagaaagagttctgagtgctttgtatgacagccttatgaaataggttctgttgctgtccctactttgcaaatgaggaaaccgagacagaattgattagtaactcgcctcaggatcacacacttaactccttggcagagccaggatgcaaatctagagtcttaactccagagccaagctcttactgagtatgctcgaccatctcagcgtgatagccaacatcttcaatgtgccctgtcctgtcttaagctctttgtatggatttgtcacatttgattcccataaggactctatgagatgagggtattttttatcattttccagatctggaaacttggtcacagagaagtagagtggcctgcctttgaggtcacgcagcgaggcttagcttccattggttacggtacttctccagaagttggcgatggttattcagctggattgccatactacctatggcccttaagatcccctcccgagaaagctaaattggttgaagtgtattgcagtataaattctttaaggatttttggattaaattttctgtcaacgtcactgctattcccttgcaacaaccccctttttaaaaggggataaataattgacataatagcgtctccatttattgctatgcccattttcattatttaacactgcatatgactttgaaaacaatcccaagcacttcgtttcctattctggccccctgcatttagatgctgagcccagcaagggacagatgatcttgcctatagcccttcatgtgttattggtgcttaataatgtttgatgattgtaatcgaccttgttgttaccttctgcgaatcgaggtttgctgagtatcttcaatctggggtgtacttggcatgacctcacggagctgcaattgaagccatggttgaaaggtgcccagatgaaatattgggtaacaaattggaattgagaccagtcatcatctatatgcacctgcaggggatggtttcactgttgctctagagcatccttggtctgtccctctcctcttctgtcctcgcgtgtcaacaagtctcgtctgggtctttctttctttctttctttctttctttctttctttctttctttctttctttctttctttcttctttctctcttctttctttttttagatttttattttatttatccatgagggacacacagagagaggcagagacacaggcagagggagaagcaggctccatgcagggagcccgatgtgggactcgatcccgggtctccaggatcacgccctgggccaaaggcagacgctcgaccactgagccacccaggcgcccctcttctggaacttttcacctcatttgactatatgtctgtttctgtgccttcctgtgctgtagcttctcacagagaggtctacacgtagagcctctgaccttgggagcacacggaaattcccactcacctgaaattgtactcttgcatttcctgcagtttctttctcaccaaatagatttggtttgttcccttggtcacttttgttcatcctcttgatctcgctcagcatctgccctagtccccaccaccttctctttgaaaccttctgatgtgttgccttcccctcccaccctcttcctttctggtggtggttttgttgttgtagcttgttcatttttgtttgacttttaaatctcaaatctataccctcttagctggaagagctcttcaagattggtattttgtgtgtgcctcttttttccacaagccctcacccttgactatctgatcctgcctttttttttttttaaagatttatttatttgtttgttcctgagagacacacacagagaggcaagacataggcagagggagaagcaggctctctgcgggggagcctgatgcgggactagatcccaggaccccaagatcatgacctgagccaaaggagatgctcaaaccctgagccacccaggcgtcccctgatcctgtcttttaacttcacacgttatttgctctttctccaccatctgaaatgcaggtcataaggtgagaagtcccatccactggcccgggagcccctgagagcagggctcttggccctcctggccccacacgtttctgatcaggtctccccacccccagtcatgccagacttggggagagcttcctggcgcggcttacctgctgcctttgcctcccacctgctcctttctccacctggattggaggatttttactccaacatcagaactcaggtcgcttcttgtctccgaccttgtatgtgtgcggaggggatagatatgccattttgcctatgaccctgcaaaagtgattgaaagctccttccccctccaccccctcaggggggagtgctgttaccctgttgctctagcttacctcacccggggaccctttcttcccactcactcacccaggtcgaatgtgagtcagtctttgtagttttaattacactagaaccattaatgtgtttttcctctgatggtataataatgctcctttagtctcagacccttactgtaggtcttattccttctgccaacctctgaggactggagctcttcactgagttccttgaatctggaagatcttggtatcttactgtgcatgtcacttttctgctggaaaatatcgagtgtctctgcatggtctgtgtggtctctatggtatacatctatggcccgtgtctgtcttctctttcaccatttctgatatggtcaaggtccagcccacctcttccttcttcagcttgaagccagaacagctgcgtttcacttattctgacatgtgagtagtgtattctttaaactttggtttgcgtgtaagaaccaggtgttgcacttatgtgtacgtttccccaacacccagctcgaagcttttgcagaccatgaataaggaacaggtacatttgcattcatgcaacagataggtggatgaatgaatgaatgaatgaatgaatgaatgaactgccgtgaattttctaagcttcaagtttcatactccgagtctaaagtttgcatctttatattaagaagcctatctaggcattagtttgattaggctgcagcccaacatatgtcatgagatatgtcatggtctgattttttttttaagatttatttatttattcatgagagatacacagagagagaggcagagacacaggcagagggagaagcaggccccatgcagtggcctgacgtgggactcgatcctgggtgtccgggatcacgtcctgggctgaaggtgtgagccacccgggctgccctcatggtctgatctttaaaatgggattttcacgtgctgccttattatttgagacttttaaatagttctccttttggggaacatcaccgtataaggagaatttcacacaaataactgaattcacagccaacccatgtcatggtcatgtacgttttgccagaagagtaacaggccagtaggttttttgtttgtttttaatagtgtggggttttgtttttgttgtttctaagcagggtgtcagcatgtcagtaccatttcgatggcccatattcagagtggaaacttgacccagctgtgtgtttgacccagagaagggccatgcgtggcatcccgtgaggatggcttgcataccaagtgtgaccctcaggattaatggagagttgcagaaaataattttctcgatgaacttaagaaactttaaacagaactctttctaactataaatagtggggcagctttgtcctatttttattgtagagcgcacagaagatggaaatcaatattggaagagttgctttatttcgccaaggaaaagatcatactcaacacgattcttatttttcttggcaggctcttctcaaccatctgtgagtccaggggaaccgtctctcccatccatccatccagcaaaatcagagttaatagtcagtgtcggcgacgagcttaggctgtcctgcaccgacccaggatttgtcaagtggacttttgagaccctgggtcaactgaatgagaacacacacaacgaatggatcacagagaaggcagaggctggccacacgggcaattacacgtgcaccaacagagatggcttgagcaggtccatttatgtgtttgtcagaggtaaatgtgtggctttctttcatgctatgctttagagaacttaatatcctgttcttaattatggatgacatagagatggctgagccatagagaaaatatggctaggtctagaaagcctaaaacaaatttttctttgttggtccccccccccccaccatctcttgatacatcgtggctgtgggtatgacttcagccgaaggtctgtgagcctgcgctgctcttcctaatgagattacaatatggttagcccatttgtcctggcactctgagtaaaccctgagaataaattaggccctttgggaaagctgcattttaatgccttgagatcctagatactcccacttagtaaaaacacttcagggaacgaaaggcctcggaaggcccaaacagaccaacacttcaaaaagaattgacccacttttagggagcaaattccagaaaaataacccagtcagctaaatcaccccatgtccctcttaggttctttaatagttgtcagttgattcatttacaaaaaaaaaaaaaaaaaaaaagaaaagaaaaagaaacaaagaaccaaaacaaaatggtgacctttttagaaacagaagaaaaatatgattgttggatttccgtacctcatttcctatgataaactcggtgattcgcctgtgtttgcttaacatccttgtcaagaggaggtttgctgatgtgtgggaggcaggaggctctttctgttgatgtaaaaacaagtacttcgagctttaggagatgaatcctcaggtcataggaggaagaatagagtcctgggtctggctctgagtttctgtccagtgaaaacgggactacgtaggaggcctcatccacagtattgtgggggaataatgaatacatctgtcctagattgcaggtctgagggacctcaagagtttcggtttctcaccggaacactgagagtttcctgctctgtcttcctggtgtaattgttgtcgttcaggagaccagaatcgtgcaaattctagctctctcaagggttcataaagttgactcacctcgtattcgctgtagagaaggttgcctctcctcggtgtatctgttattctcctacgtgggtaaactgagacctacccattggtaaggcacagcttagcctctgggtatgtttctgtaattgtggaggtatcctgtgtgctggtcgttggcattcgagaagatactctgatttccaggtggtaatgaagtctcattctgcatatgaatacagtgggtagatgactgaataaatggggggaaactgctcaagtagccaagtcagtctcgcagagttcatggatagaagggaagtcttcctcaataaatcagagctacaccaaactactactgatttgagatgttttggatgcttgagtagtttgttacagcagtgaaggagattggggcattgtaggagccgggttccagcaactgagaaagaggagatggaatgataaccagcgatggcttcggacctcagttctatcctcatgaggtgctttattcatagaacaaaggagtgaggctgggacatgcgtattattcattctagaagttttattttttttctctaaaatcaagtgataaatatatttcaccaatgtcaaattgattttttgtgggacaccgaattccaagtggaatggacagtaaatcaagaaattctaaaaatttatttttatttgtttacttttgtatattttttattggagttcgatttgccaacctatcggacaaaacccagtgctcatcccatccagtgcccccctcagtgcccgttaaaaaaaaaaaacaaaaacattttaaacatgatctgttggcccaaccgtctatctgtattatctttacacggtaggggtggccgcatattgtgtgtacagaatgaggtttgttgttgcttataggaggtcccagtgtgcccgaggcttttccagtccacacctggtgtcctggcataattattaatggcactccccttcactcacgagtgtcctggttcagatgatgaagtatttgccacagcattcccgaaactcataagaccccccttgggaatatggcttcatttgatttccagaagtttatgcttatacatatctttcaagaaatagggagagtggggcccatgatgacatttgtacagggtggccggctgatggtctcccaggctctatgcagaagccgaaaggtcctggccactgggagttctggaaaggcccgcaccccaccaccagaagggtagagaaagaacacctttccctgaccctaatgggtatcatcacacagcctttgtcttagcctatgctgcttgagtattccctgttgtagaagaatagtaactattatagtaaaataccctccgagttttaggggctcaaatcgtggtatcagttggatagggaattgagttccgctcagccatttctgggccatgtcactgttttaggagagtcacttttgagacttcagtttcttcacctctaaaaagggggggggtaagcatagtgcccatcacatcaagggggtaagcatagtgcccatcacgtcggggtgctttgaggatgagatgagctaaagtgtaatggtccgagcttagtgtccgacacatgggaagtgtataacaaatgttaactgttactcaattcgtagtatttggataaattctgttgcttgcaaagagcgaacaaaatgcggagtcgtccgcgatgttttaaatatgttctcggtgcctgtggcctgccattcagacgactgatttttgatatgctttagatcctgcaaagcttttcctcgttgaccttcccttgtatgggaaagaaggcaatgatacgctggtccgctgccctctgacggacccagaagtgaccaattactccctcagggggtgcgaggggaagcctcttcccaaggacttgacgttcgtcgctgatcccaaagctggcatcacgatcagaaacgtgaagcgcgagtatcatcggctctgcttgcactgctctgcggaccagaagggcaggacggtgctgtccaagaaattcaccctgaaagtgagggcaggtaggggccctttctctctttcttgtggggaggcggagcatctgttgatggaggggtgacttgtctcctctccctggtctgtcttactctcagcggtcaggtggctggctcttcatcactttccccagctcccaactactgtcagtggccggcgaattctttgtttcatagccccaagccccacaccaccagtgcacggccaccgttggcaggtgcatctgccagaaaccagtgtgtagaccctcccggggacagctgtgaaacctcacaacatcaggacactcagagtttcataactgcatgaggtgtgcttccaagggaacctcactgcggagctttgattccactgttgggaaagattagcatatacattattcaccccttgatttactgttgatagaggaattgagtttctcctcagcgatttgattttaatgcattcccagacttattcccagtctgaggaggaaagcgccaactgagtatggcccttgttatcatcgtggcattatgttgattattttcgtagccggaagatgtctagatttttgtgtctccgagatcatcaaattcaacactgggtgacattctgctatggaggggtttttatgaaggcttttgaaaaagggtgctcattgggattaaggaaagtttgactatttaaaatggagatttttccagaaatgagcaagatattatcactacggcacatgggaatgatgcctgtttggttgaaagaatataaattagtcgtaggtcacgtcctcatgaaaccatcagggttaaagccactttccctgtgccagggcttctacttgtttcaaaatagctttggccaggagcattatcatctcaaagcagacgttcctatttttttcactcaatattaatgaatttgcttgaaggatgcaagatttaattgctgatgtcttcagatagtcaagtaatacagattgattagtacttgagattttatttaaaagacgcccaaataagttgggtgcatttgaggaaaagcagtaggtgacaatggcatatgatcacggaacaaataatttgagggccacgtttcttcttattctagccatcagagctgtaccagttgtgtcagtatccaaaacaagctctctcctgaaggaaggggaagccttctctgtgatgtgctttataaaagatgtgtctagtttcgtggactcgatgtggataaaggaaaacagccaggtaagtggcttatttcctttgtttttctcaatacattgttctctctgtgggggacattttaaggttttccccttaaaacagtctattaattatcctggggatggctcagctggtgtgtctgtctgaggtggggctgtctgggcgtgtgtcgagatgcacatttccccctttcgtaacaccatatgtggatgtgtatattcattattagcgacaaatacgtgtcattttgtaaatttattttgagaagaccgaagagagaacttcagactcctgttctataccgtgtgctgtttctttgacttttatagggaaatttataagaacacttcttgttagccacgtacgttaaccttgatttttaagactcttaaaattatccaggccagatgatttattttttattttttttaaatttttatttatttatgatagtcacagagagagagagagagagagagagaggcagagacataggcagagggagaagcaggctccatgcaccgggagcccgacgtgggattcgatcccgggtctccaggatcgtgccctgggccaaaggcaggcactaaaccactgcgccacccaaggatccaggccagatgatttaaaatattgggaaaagttgtcaattttttccccttccatatttaaaaacagtcaatgatctcatactaactggggcgctccctcctttcccacaaagtggcctatccatttgagagctgtgtttccttttttattgatctgacttctcccctctgaggctggttacctgagatcaagttgctaatggttttctatttgttttagtcactattaataaaatggttatctttaatctgaaacatttggacatgtttaagttctcattcatttaacaaatgcatattgaatgtctcctatatgtcagatactgtggaaggcagattttaagtaaattttaaccagttatatgaagttttttttttccctctctctaaataatcattaatagcaaggtctttcaaattctaatttcccaaatattttgctttaaaattcccattgaccgaattttcagtaatttttatttgcataattttggccatctaaggtaatttgctatcacagtggtttttcttcagaacacacatatgcattacatgggagaaaagaaatgatatattttcctcctcctcttcctcctcttcttcttccttctcatgctctgtattcaacatgggcaatttcatgcctctttaaagaattttttgctccataagtaaccatggtgattagcataatgcaaagtactatgatggtattcacatagacttgtgatggatgatactttgctaatgaagcctgccattgactagagaatggattgtactagagtcttgttctttcagaccagtggctcaaagaaacaagttttagtttccatatcatataatttaataaaaacaatagcttatgtatggatttttgactaaccctacggaacgcaatcctatattaattggctttccataatccttgatttcagatgagagaacagtttagaccatgtgtgtatttgagcctctgtataacttgaaaattagccttttttcatgagaaattcaattgccccaggcagttttgttctgaaccacttttcccaggagtcctgcatgccattcccaattaatccactggcgctgctagataagccttcagtgttgggagctctttggggaaatcccagtgtgcacctcaagggttaaggaaaaccaaatcacatgcaaacaatatgtaatgtgtgacttgcagatggggctcgtggctccatgccaaggttcatccatgaatcttttgttgatatcctttggcttcattcggaatacttagcactgtgagcgctatcaaattatcttaaaaattcctggtatttgattctgaccgtttagaataagtttaaaactcacagagaaatttaggataaaatgactattctagagtttttgcagttgtttgttttaaaccctaagagagtcttggagtttattcaacaattgtgaatcttggttagctttactagtgcctctaaacccttgtatttttacttttaattatgttatttgacatcatcttgaattacggtctttgattttaggtgttgatattgtatcacataggaccaagctattccttcctgcgctgacatgtgttcattgttcctgtttagctccttgttatagacccttgggctacatatatctataccacaaatctagaatgtggtatgttagctgtctgttgtcactctgcctttgcagagaagtctgtgacctggtgaactgggagaggacaaaacagtgtcccctcaccttgctactgcatcttcttgattgctcttctgcagtgagatggcagatttctgccaattattagaagaatctcttggaagagagtgtcttcatatctgcattgtgcttcaaaatgaaaaggcctttaaagatctctgctttcttatttccttttatttatttgagagagagagagagagaacaagcaagggagggagaaacagagaaggagagagacagagggaagagcagactcctgctgagcagggagcccaacgcagggctccatctcaagaccccgagttcatgacttgagccaaaggcagacgcttaacctactgagccacccaggcggcccccctctcatttccttatagaaacaaaagctgagactagtagtatccttgacttgctcaagatctcacagttagttaagaaagcaggtttctcttctttttatttcaaaacattccgctttggcagtctgctcttatgtatgctcattttaatgtaaaaaaaatttccaaaaatataataacatgaggaaaaaagaaacagatataattccaccattgcatgttgtagtgctatgcaatgggaaataaaatgtgagcctcctatgtaatttaacattttctagtaggcacatgatagagtcagagtaaaatcgatacattttatttaacctagtatagctaaaatattatcttatcatgtaattaacataaaaaatatcaatgggttattttgcactactatttttcatattaaggcttcaaaatctggggcatactttatatttataacacaagttggacctcaagcattccaagagctcagtagtctttgtgtgtctggtctttataaatactatattgcccattttttttttcatatttcttttccctctgctcccatgcatatgtattaccacatgtttgcagttttaaggtacactcagtttatgcttattaagtaatataaacctttttcttattttcacatttataattttgatacttggtatacatttaggccatctctgagatttcactgcagtaaatattttgaaacttttttaagaaattgagttatttccttgagataaatttgttggaattgatcaggggtatgaacaaattgccaagttgctttccacagggcttgttctgatttacaatagtgtcagaatggtctcatgctaataggttgaccatagcctggccagcgcattacccttggtctcatttcatgtcaacatcagctcctgtttcctttttttgttttgttttgttttcagttatttttttctgtaggaatgtgttcattttaccgaaaatttggaagatgcagaaagctctatagtactccctctaatattttcagagtgactatagtttatgttttattcccatgatgtttttcatacaagaaatctctctgtgtcttgtctgtaggcaaataatacgagtagaatggtgatatcacaagagtaaatttgcaactttttctcttccactcatgcttaaataatttggggtttggtcttagacgtctcacatactttggaactctttttaatagttgccaaaattctactggataagaactgtaggatgagtttccaagttagttttagacattgtggttcagtttttattcgtgaaaataatataaatgttaataaaatagaatattattattagtgatgtgtttcctttcaatcactgggatatagagataatgatatgacctaactatgaacaattggtgtcgctttttttcccctactctggaaatctcactatttattttctaagatctgcttactgagagcagaatgtagtgaatgtactggatttgagttcttgatatgacctaactatgctgactaaatgtatagtatcagtattcagtaatatttcttatatagtaacttttaaaatttggcactgttaaaatatttagtgctacagagaatttggaattatgtatgccatggttattatgaaatgaattttcatgttttttccaatcattaataatgactatctttcaatataatcctgtaatatgaagtgttccaatgacagacttgtcatgatgctttattattcttacttaagtagtgtataatgaatgttaatatggagcagttaattgctgctatttttaatttatctaggaaagatcctgaatataaattttatggtaatcttggattttttttcctctctttccaaaaccagcagactaatgcacagacacagagtaatagctggcatcatggtgacttcaattttgaacgtcaggaaaagttgattatcagctcagcaagagttaatgattctggagtgttcatgtgttacgccaataatacttttggatcagcaaatgtcacaacaaccttggaagtagtaggtaaatatctctatcagaatgtataaattactggcagtagtgaaagaagaaattgctagatagcttcctttttatgttaatagaatgatgaagagattactagaaatttaattgtcaccacatgaatgaatgaatgaatgaatgaatgaaaattatcactatcgccttttccaaccagagcacaaatgcaaattccaccagtttaatagagaggaagtggaaacttgtaactgaagttgtttaaatgggtcattttctcccatccccccgcccctccctactaaacaaataagatgttaagtggaactttttcaaaaattcgagtctttactgaatgactcgagtttagaaatgggtgtggactttctcagtggaggagtgcagatgctgagagcctgaagtagttctctgaatcttttaggggggcacctgagcctttggtttatcttttaccactcatgggtctagttcatttgtcacaggaagggctgaattgggctgcttcttcctaggacaccgctcactttaccccatcctccagccttgtaggccatggtgtgaaccttcaggaaggaggtcccctggggcctgaatcattggttctgcacagcataaactgggtcatggtaccctataatcctaaccccatcatagctggtatgcacaagtggtttagtttccttccctactctggaaatctcactaaatatttattttccaagatttacttaatgggagcagaagatagtgaatgtcctggatgttttttgatttactggaaataatagtatttttaaattgctttatttacacattttttttgttttgtgagtattgtttgaatttaatctcttgtgtttttttttaatgcaagtacagtctctgtgcttgactttgattaagtactggtagggtggcaaatttcttcatcatgagcaataataaaatgatgtgatatttgttttcatttctcctctttcccccgtgtttcctcaataatttatgaagcagtgttagaggtctgtgatttatcctacaataatctcatataattttggcatttctgcccatgttgtaatggaaagcatctcaccagactaaacgtgggaaacacgctttacttgcaatgatagaaccagcatgcagaaagaatattactttttccctaaacgtgattgtgaaccatttattaatttgaatggaaagctatgcttttaaaatattaaactccataagtgctaatttgctaagttgattagggagcatgttgatatatcagcttcagctccagaaagcaattagtaaggatgttttgagcatattattgtatgtaatcagatttttaaaatccattcatcaatttccaagaatataactgtgtaactggaaaggcttgtggctctgaaacctgaatctggttttttattgttttgggatgggttgggatgggacacgaacaggaggagacaaagagaaaagtaatttctttgggggctggggtaggaggatttggataccatgtggagtggctttgggatggtccccacctggttttaagttggggccatgccacccaacttttgaatgcaccctactttaactctgcctgcattttctcttctgagaaaccctacctctaactccagaggttatagagaggagaaaaggcaatagatttcatagaagtacctcgcataacgtttgtactgattaaatattaatcatcaccaatttcttaatgcagaagtacctgaaaaaaatcatactttatgttaaaacaaccctgatggaattctttgatttgaataattctgatacttcatgaatttgaaggacataaaagtatattgagccaaaggactctggaaaactcaggaggaacttaagtattttatgtatggtgatgatgagggaactcatttcagtgcaaatattgtggtccgtaatatttgagtattttgcattgtgtgggatcaatttatgaccttaagaacctgaaactgtaacacagcactccgatgaaagatttattccttcaaaattaaccgaaaatctaaattttcctttaaaaatggcagagggagcttcatttatgattcaggcattagaacagggtggtggtttccatctccagctttcacccggatgattttttattctcatctgtgacacatccttttcattggtacagttggactctttttcttattctgaatctctaggaaactaaagggcagtaaatactagaataacaactcatgtaggaccttaacatattcaaccgagtagtgccaaaaataatgaataattttaaattttataattcttaaatttggggaaagaaatggaagaataaaatgtgaaaacccttccactaatgtgatataactgtttttaagatttggtaaattgcttatatttttgtacgcagcagggtttcagttacacataggatgtcactctctctctctaactgaaagtagagaatctagggaatttgctactgtaagaagaggccagccttggcttctcatgaacctgtactccgatctgggctctgcctttgggtagctaccatttagttttccaggactggatatttttcatgtataaattaggagttctaagtgttctctttcagtattgttatacaattatatatttgccataattattaattagagtgtatgctaaactgcatagggcagttcttggcacatagtaaacattccataaatggtggccataaaactaatattggcaataattttattactttttttttcaaactctttcttatattattattatataaccatttctaagggctgcttgagaaaccagttctctgattttgaaaattattatgtccagggtagatagctgttcctttggtctgtagttatccactaaaaagggatctcaaatgggaattacagggttaaatgggagaatagataattatagaaaatctatattgctaaatgctttctgaaagagttgtgccaatttacagtgtgtaattcggcgtgctacttttaccacactcgcaaaattattgagtttctttcaaattagttttcctatttttccacaggatggatatactttattttttagcagctttattgaagttttgctatttttaataagtgaagagtgacgccttattttaagtactagtttaaatatttctccatctatattttcatgttctttttcttattaccttacttttactatatagacatttaaaaaagcttatatattcagattctcgggatttttatgattttatgattctttttcttccgtggttcctaaaaagcctagaaaactgcccttccccctccccacctagaagtttgataggagttagttctgtttagttaaaaatatggtagggttattaaggtgctgtccttcatttcatctgtgatacatgatgtgatgagaagatggatgtttatttttcttcaaatactaaatggtgttctttcaacatcttcattgaccattaggatctcttcttcatcttgattttggacaccttcatatcatcacatttatattgagtctgggtatgactatttagtccaaaggttttttgacctaagaagcatcaggaccagtcattctagaagactttgaacaagatggtgctagatctttaagagagttgcttgagagacaggtgggagaatgaacatttcagggctgtcctttctcactttatgatggtgattctacaagagcaaaaagacccaaaaaaggtacaatggcaagtcaaaatattcttaatacctgaccccagtccgctatccttataaccaaaggtgaagctgtgttttctgttgtgtggttgtggatcatagtttctccctgttttattctgttataactagataaaggattcattaatatcttccccatgatgagtactacaatatttgtaaatgatggagagaatgtggatctgattgttgaatatgaggcatatcccaaaccggagcaccagcagtggatctatatgaacagaaccttcactgataaatgggaagattatcccaagtctgacaatgaaagtaatatcaggtaagagaagagcctcgcactggggattagacatttccccccacttcccttggcttaccagatcctatttttgtggcccataagtgtgtgagaggacacctggcataggaggaagtgtggggctccttcctgagtcttcaggccagtgtttccttttgtgttggtttaaaacccgcacaaaaagtctgtgcatcagttttcacatttctgatatggaggatgattgaaagcagggaatggcatattttacggacacattaaattatttttcagaggaaagaggaaagtgagtgttttgaaaactttttaaaaatactgtcaagggcacctgggtgactcagtgggttaagcctttggctcaggtcatgagatccagccttgggttgggctccctgctcaatggggagtctgcttctccctctccctctcctcctccccctgcttgtgcgctctctctctctctctctctcaaatgagcaaataaaaatctttaaataaatacaatctttaaaaataaaaaatgagaactgtcagaaaaagagaggtgcctatgtcattaagcctctgactcttgatttctgcacagctcatgatctcagggtcatgggatcaagcctggagttgggctcccggctcagtgaggagtctgcttctctcctctctccctctgctccttcccaccctggccccacagctcgcatgtcccctctctctgtctcaaataaataaataaatatgtcctctctctctgtcataaataaataagaaagtaagtaagtaaaacaaccaactatatgaaaactaagtctcattcattcagtagctttggtccaggcagtgaactcccaagttctatgacatcacacctctctctctctcttttttttaaggatttaatttatttgagagagaaagagcaagcgcacacagcgaggagccgagggaaactttagcagtctcctccctgagctcagagcccatgtggggttcagtcccacgaccctgagatcattacctgagccgaaactaagagttggatgcttaactgactgagccacccacgcgcccccacatctctcatttgatcctcaagacatttcttttaaaaaaattttttttttaatttttatttatttatgacagtcacagagagagagagagaggcagagacacaggcagagggagaagcaggctccatgcaccgggagcccgacgtgggattcgatcccgggtctccaggatcgcgccctgggccaaaggcaggcgccaaaccgctgcgccacccagggatccccctcaagacatttctaacaaaaacagtagcaatcataaaatagtaaaaaataaaataaaaatagtaagtaaaaataaaattaataaaaattacaaagcaaaagcataaaagtagcttactttatgtaggctgcaggtgctcttgcctgcgctgcactgttctcagtaccttccatatattaagtcaataatttcagtcctcacaaaccccatggacaggcacttttattcttttcatttctgagaagaggaaactgagacacaaatgagtcttgatgtaacttgaccaaggtcaaattgctaacagaagtggatgccttcatagactttttttttttttttttttttccagtgaagagctatgggctgttgtaggaatatgggtgagagatgaggctgtcctgggtcaaggtgcaggggctggagggaggaggttagattcgggaggtatccaggctacctctttagtaagactcagcgactgaggggataggagagagaggtaggagctgaagataccccttcagattctgtatctgtcagctacgttggatggtgagaggtgatgtctttcaaggaggagggggaagggttgggatggcaaagaccatgagtttttggggttggttgaatttgagaatgtccatgggctcttgagtgtggacattcaggtaggaagtatcgagggcaggttccccagaagcagagcctgagacagggattctgggtcaagagcttcattaagggagagggagagcagggcaggaagggtaaaggaggaaagaaaggatggaagggtgattggcaggctgatctcaggggcgctcatcagagcttttgtccctccccacaggcagtcactcatcagctctagacctggagaggcagtcagtgtccaaaaggggccaagtgtccaagggcaagacttgggaggatgttgcaggtgtgaatcattataagctgtacccacgaggcagggagatgcaggcatgcaaatagctctgtagaggaggcgaaggaccgagaactctgaaccagaggtaaagatttgaaagctgtgagcaaacagcaaggagttcattgtgagagtggatcgctcgggggcgtgtgcattgtgagatgagatgaaagtctgaagaggccactgcgtatgtctgggcggttgtgtatgttgctcacatgggtcaagggctgcccagggcgctccacccacaccagcgcccatgtcgggaactcccttggcaggcctgtgggctcagtctacacagccgtatctagtatcatcccggtaggaaaacagaagcttgaatagcacatactggaaaggatgccaggaagaagtagtgggggtgaaaggagaattgggagattatgatctttgcaagaaggaaggtgagggtcctccatgtgggcacctgctcgtctgggggccctgccaggggcacagcgttatagggcagcagggcgggtgagttcaggacaccggggaaggattatgggcagagggggcctgggcatgagggcagccaggaggccaaagaggctgcggcctccacgaggccacgaaagcctctccccactcagccattgggcccaaattcaatacatgcctataggtttgtatctgttaacatggatcctgttaatactgagttaagtgcttggtctggttcttcctcccacaggcatgtgtttccagagagaaactgtggacaagatgcgcacccgaggcaggccgtccacgagtgcttgatttcttttcttttctattttatcttttgtagatatgtgagtgaacttcatctaaccagattaaaagggaacgaaggaggcacttacacatttcaagtgtccaattccgatgtcaattcttcggtgacatttaatgtttatgtgaacagtgagtaaaacgaacggtcccttatctttttattttttattattttaagttgtggctcgtgcttggaacagctgcagcactgagctcgttgtgtactatgtaaataatgtttcatgataattttgaccttaacaaagaccctgtggtttggtggttggaagaatgtgtacgaaaaccaattccttgccctacatttcactgaccacgcgaccttgcagaggtcactcggattccgggtgctgccgttgaagcaaacagaggagccagagaagttaaaaataaccgtcatgtgaggggggaaaatgtattattattgattgttgaaatggggagccagaggttgaataggacctggattatggtgttagttgggcaagagatgctatcaggctccgtcatgatttctctgttagagcgctttctctttcagggttgtgatattatttgtgttgagattgttctctcactaagacgaatgcagtatcgatccagctcaacgagaccctcctgcaaagcacgtggggactgtgggagagggagcaggtggtttgggcgggaggatggctttgggcgtgggaacctgaacacctgagtcctgccctgctgtggcccctgcagcatctcagagaaatggctttgcacagaggttgaggccaagggagcatgctcgccagttggggggcttctgctccgtgcagggcaccctcctggctctactctagggcccatctgcacatccaaggaaggacagcaggtgtctgacgcaccacaccagccagaggaccaggggaccaggggatgggaggcctccacagacacagaattccaggggagtggtccacaacaggaccattgggattagccatcctgggtgtgtgttgggaggtgagggattaggagacaatctggaacattccctaggggatagcttagtaactgtgctgagtgcttcgtgtgtgtgtgtgtgtgtgtgtgtgtgtgttggggtgcaggaggggctgtgggaacaaaggggtgccagtttcttgtcctcaaagagctgaccttctgtgaagtcattttacaagttacttcattggtgctgcagctcagccttacggggtaggggtagcatgatccagctgcaaatgaagacaggagagtgacactcaaggctttggattcctaatctggagccttttaactctgtcctcatttccaagaacaagagggtcatatctgtggagctaaataaatttcttaactatagaccttgtcaggatccttaaaatcacatctgtggagctagacaaatttctttttctttttttttaaagattaattaattaattaattaattaattatgatagacatagagagagggggcagagacacaggcagagggagaagcaggctccatgcagggagcccgacgtggctctcgatcctggaatcccaggatcacgccctaggcctaaggcaggcgctaaaccgctgagtcacgtagggatcccccgccagacgaatttcttaactacagaccttgtcaggatccttaatgtgccaggaggaggctgtgggatggggtatacagctcaaacttgtttgaccacagaacttacctttttttttttttttttgagggaatcatactcattaacgtctcccttcctcagaacagtgttgattatatggtatctcattggcctgcatttcaaatagctctagattaattcagatgttaatcagaggagcttagcatagcgcacatgggcaaaattacctgcttctgaaaaatctcaatattcaagtaacttaagagacgattacaggtaaatcagtattcttacaagccgaatatgcatattatccacccaaaactggatttttgggtgctctagtgcagtgcttctcagactgtctatgggaaaggaccttttttttttttttaatttccaagttattcgggatcagtccttgctacaaaatacggtaagaacctatcactaggaaagtgaattgaataagaatagagatgtatgcaaaacccaagtttaaatttttttttgtttttttttaaggagattccatagatagaaaactgctcctgctaaatgcttcttgtcagctgcacctcacctctttgcggaccagtaacagcagatcatggccgcggcctactccacaggcctcacttcagccctacttgggagcggggaattttgtaaaactcagtgccatttgcatctgtctttccctggcttcaaggtcaaggaggctgtgggtcaatgaccttagaaagatgtctctgaagtcccatttttctggtgacaaaattgctgccattttacttaccaggctcatttgccatcccgcacgattggtgttagtcacctctgctggtgaactcctgcctctttgaaactagatagggaaccacattaagcttcccaaatgattttttttttctggagggggtggattccctgttggggcaggactttgtttatttgggggcccaggtctcagatgcccacccagcatcaactgatgaacagctgctccatggcactgggcacacagataagggtggtttagtgtctttccacttaggtaaagtttttcaggaagtctttcattgctgtcagtttgttataaacccttaaccgacaaaaggcatttctttcatttacctaacacgttggatttcttgagctccacatactttgacagaggtggtatttttttgtgtgaaacttaaaaaacatctacctcttgtgaagtgtgtccaatcgctctttacagataaagttagctaatcactttgtcgattttttttaattggaaaaggtttctaatgttacactttaaaatcaaaagctaaaaatagttttgaaatttaaaatcggagcggttgtgtccgttttgacataacatttcagctgagccaagtagatccactgtgtgatttgttctgtaaataagcttagccccaaggagggaaggaattctgctgtgcaaaaattagaattgataaaaatcagaataataaatgcataatattagtgcagaagttcagtgacttttcctcagtgacattgctgcataattgcttaatagattcaactgggagaaatgcttatgaaaatccccgattttgaatggttaaatgtttgatcgttgaaaaattcatttgttttaaaaactccacatgtagatttgagtacattgagcgtgtgcgtgtacgtgcgtatgcgtgtgtgtgtgttttaattgcttatgtgggaggctttaaaaaataccatgttctatcagtttgtgttagagaaaaatgtgtagcatattaaacttgataatgttttaggtctgtttttaactcctctaaccaagctatgatttacatgggtctgttagttggctccatggcattaaaggtggtgtataaaggacaagagctatatgacatatttgctatttttgagcataactcccagtggaaactgatgggagtttttgtttttttgtttttttgtgtttttttttggttttggttttgtttagaaagaatgagagagagagtgtgtggagttgaggtcggggccagagtgagagggagaaagagaaccttaagcagactccacacccagcacggagcctgaagcggggctccaatctcatgaccctgggaccgtgatctgagccaaaatcaagagtaggactcttagccaactgagccaccccaggtgtcccccaccccactttttttttggctggggggaaggaggggcggagttttcattaaaaaaaacaaacaacaaaagcattgaatttgcattactatagtcacccttgccctacttattgaagatgtatatagaaatcaggttctgggactcctgggtggctcagtgtttgagcgtctgcctttggctcagggtgtgatcccggagtcctgggatcgagtcccacattgggctccccatagggagcctgcttctccctctgcttgtgtctctgcctctctctctgtgtgtctctcatgaataaataaaatcttttaaaaaattgaattaaaaaaaaaagaaatcaggttcttagttccaaaaagaagtgtgaggggcacctgggtggctcagttggttaagcatctgcttttggctcagatcatcatcttggggtcctgggatccagctccgcgtcgggctctccgctcagtgaccaatctgctcctccctctccctcttcatctccctctgtggtctctctctctctctctcaaataaatacataaaatcttttttttttttttaagtttgagatctttggtgaaattggccatttgtttcctttgcagatcaaaattgggaggaaagagttctaaaatctatagagctacccaaacatgctttcttgttttctttttttaaaaaatatatttagctacaatgacataatatacatgataaaagtgctttcctaataggacctactctttctaaaattcttagaggtattagaaaaaccgacaccaccaaggttctatatgtagcctatgatacttggttagaaacctatggtctctttgtttgcaataaatgtcacacaattgaggtttttaccagatccaggacaaataaaaggccaaatgcacatttaactctaagtgatccactgtctcttttccctccccacccaatatttcttgattaaatctcaaacgttgcagtggacttaaatgttagtaatgtacatatttaatgagtttattttgacatataatttcaaatgccccatgtgaatcctgaagtaacctacatgatggtggaaagtatgattaatatgataaaacaattgttttttcacaactgtggaatgatttttttttcctgtggaatgattttaagaagatctaataaacttataattttatcaattgtaccccaataaagctgggaaaaataagattttaaagtgtatacatgattttgatatatgtaaacatttgaaaagacccccccacacacacacacacatcaagttaattaacacatcagtttacgtgtttatgtttacccttcttgtttttgattttccggggttttgggggggcggggtgcttgttttgtgttttggtgagaacatttaagctctactttcttagcaaatttcgattatgtaatacagagttatcaactatagtcaccatgtaattcattagatgcttagaccttgctcgtcttacacctgtttgtattcctttaatgcctctccccattcctcccatcccttaggctttgacaaccacttttctactctttttcaatgaacttgattttttttttaaagactccctttaagtgataccatgcagtatttgtctttctctatctggcttattacatggaacataatgccctctaggtttatccaacctaatttgttgtcgcaaatggcaggatttccttttttttcaggctgaacaataatccagtgtctgtgtgtatcacattttcttttatccgctcatccatcgaaggaaatttaggttgtttccataccttggctagtgtaagtaataccgcagtgaccatgggagtacagatctctcttcaaggtaatagttttgtttcattaggatatgtatcaagaagtgggacttgctggatcatatggtagttgtgtttttaatttctttgggggaacctccatgctcttttccacagtggcaccagtttgcattcccaccaacagtgcatgagggttcccttttctctgtgcctttgtcaatgtttgttatttcttatctttttggtaatacacgtgctaacggtgtgggtgatcacctcattttgctttttttgattcacccatagtcttaaaatgcctcttgaacacattatcgggtaacctttccaagatcagctttgtgaatctaaaatttgggggaaatggtatcaaggggccataagtagatctctggccagtcttaaaggtctgccctttaatgacaaacctcgccaggtgagtcagagtattgtggtactggggggctcagggggtggtcacaggaagggagggaggacaagcatatagagagaactcaggggcttgcccttcaccatcgggcttatgtggaacacaggtcctgttaagctagaccggctatccaaaatgactgcagaagtacaccaaattaactttcaaagtcaccgactctacttcatttacggcagtgttaacagtgggttgaaacgatttaaggaaatgctaaataatgcattatttctaaatcaccgtatcatgtaattaacatcctgtctggtatgagcaattatttatagatcataccgcgtgcccgtatcagtcaaagtaataaatcatccggagtgaggtctcttgatgaggagtaagtttctctttgaccacgtttgcaaaatctgggctgccttttatgtagttttggtcatagttcaatctgtcctcctagggagaagccactctgaaggggagcaccccgcagacaaagtggcacatttgccaaaggtgagggcagatgtgtcaagtcagccacgtaaatagatggcttagaccccctggccagacagccctctgagtcacccacctggctggaagtcctcagggaccttcacccagggttaaatggtaatgtgggctggccttcaaggattgctcagtttaggggctttgggtctgtgtctttcatgatccctgtgagatgagaacagagttactagaactttgcctttttgggaggaagaagtgttttctaccatctgtctcccttttttagggctgataggacctttcaaacatttgggtgtccaaaccattcttgcattagaggctaaacgttttaataaggcttatgactaacacacttgaccattgagttttgcttaagaggttttgctttttagtgttttttccccctattaggtggattctattaaatctactctaaaattattggaattctttttttttttgagagagagagagagagcacatgagcagtggggagaggcagagggagagagagagagagagagagagagggagagagagagagagagataatgccccaaataggctccacacccagcccagtgtggagccccacccggggcctgatcccacgaccccaagatcatgaccagagacgaaatcaagagtcggacactcaaccgactgagccgcccaagtgcccccaaatgactggaattcttaaacattaaataaaaccagtgctgaatagaactcctttctgattgatttacttgcttttgaaaatttgctgtaaggctatcacagtaaccagaaatgtagcttggttagtgcaaacatatgtatacataaaacagttttaaattaaaacagttttttcttattgtaaaaatgtcacgcaaaggataggaaaagctggaaaatgtaaataagcaaaaacaagaagcacattttaattgtgcctcttaaagttggtttacattttatactgttgcttaatatatcccttattgtatatgttctttgtgaacattttttgttaacttttttttttttaacaaaactgaggtcctaatgcttcatgagcttgtgttttgatgctgaataatgaatgcattgcgtacacctttccatgacatgagatacctgtctgcaacctcattttggtatcctgttgcatggatagtgcatcattttttttttaacccacatctggtgcagttttgagacattgtatagtatgggatgggtcacaaatgattgactggggttttaaagaaacccatcaaatgcttatttaaggtttataattatcttgtttaatctcaaatgagtgacctagcttaagtgcctggcagtaaataaggttatcatctgtcattatctttcatgctcgcccatgtcttaaacatatgtcacagaagatttcactctcctggcttttggggcagttctaaattaaggaataattttcaggtcttcttagtatggttgctagtctatgtaaaagtagtctcttgtctttttatattaatctttttataggtagtgcatgttcatttgtgatacctgacagcatctgagctctatttttcagattctgttactgaatttgaaatgagttcttgttgttaaatgctttggagttatgagtgttgttttgatgtgacactttaatatctccttctcataatgaagatctctgtgtctgcaagaattgctatagacgtttgagttgaaagaaaaaagggatatcactgcaacctacttttaaagtctactttgattctcttatattctgaaaaaatttaggaaatgtattagtattctttttccttcgtgtatcatgagaaagttggtcgggtggggtgtattgctaatttggaggatctagttaaaggccgaaactgagaacaggaaacccgtctagatcattgggccctttgttggtgtggtctggccatcatttagtgcttatggtagaaaagcaggagaaacagttttaagttatacgactgtcagtgtctgctaggaatggaccctgaattggggcataattttctaaagacggtgtgagtactcttccctcgtgttagtggaacttcgactctgtggaagttcccttgctatctgagcccatatatgtttttacatcagattagctcccttcatttatacgtggatccaggctcatctataatttagtgtaaatttaaattaacccgagaataggtgcatgatttttccatgggttttatggcaataacccttgccttccacttttgaattatgttggaaatgaattcactgcttttactgaatagagaaatagcatttatatcacatgcctgtcctccacgtgtgtgtctacatctgctctctgcgtgtctgggtcacatggcagtggtgccctgtaaatcgagcatcgtgattctggctgggcaaggctttgtgcagttagttgtatcacttttttaaatttttttaacttaatctcaggactaggagatctttactgactgtttagaacagatgttggcaaactgtagtcctagggccggagtcagcctgcagcctcttttcaaagggcccataaactaagatttttggtcgaatggttgaaaaaaatcagaagattttgtgagacgtgaagataaaattcaaatgtcagtgtccataagtaaagtttattggaacacagctgtgcacatggctttgcatgtctggctacatttgaggtacagtggcacagttgagtatttgcaagagagaccctaaggcccacacagccgaagttgtttaccacctcagtctttaccataaaagttagcttactcctagtttagaatgtcactgcgttaggagggtgatttttttttttaatagtaaaaactctgttaaagacagctggatacaggcaactataattgaagttttgtttgatttgttaaacaaacttctatcaaagtgcccatatgccagtttctaacaatcttttttttttttaaagagaaggggagagagggaaggggaagggcagagggggagagagagagagagagagagagagaatcttaagtaggctctttgcccagcatggagcctgaatccattcagcggagctaaatctcaggacatctattccagttttatttatttatttatttttttaagtatagccttatataagtgaaagttaatctgaaattttttatagtcctgttttagcagacttaagttcctttatcatagcagtgttatggcaggaatgtggatttgacccaggcccaaatagggccaaattgctggaaagcattgctgtgtggccattaaaactacagcagacccacaatcaatcgtaaaaacaaaatgcatccttatgatccctcttcatttagtcttttattgcttgtggaggcttcagtctatgttctttgctggttgtagagtgtgggcaaatgtggtttattagcaggaactggtcgaggtgctcaggggcaagaggggagctcaactcagaaatgcttccccatcaatgactcgtgcatctcctcccaccccaccccagctcttattatctgtgctgtgtcttaaaaatttgttttgttcttgcctcccgtctggacctgatggtggtgagaaggagtattttttcaagatcacatatctttggggtaaatcagcaaatggttaggatttttttaattgcacgagccataaattctgagtagagtcgtaagcactctgaaatcagcctacaagttgatcagtgttgttgcagacgctggaatgacccaggccctcaacgctttgaaaggagaaaaggctattttcttaatctccgcaggaaatacataactcatgcacctcttaggcttatccaaacctccaacttgggaggaattagggaatgtgtcatttggtatactgctgattgccgaatatctcagaaaccacagctcagatttaacctggagaattgcagttatgtgtctttaaaagcaaaatgcatatttaatgccttacacagtgcattgaggcacttacaaaatgcagatgagcccagattttcatttttaggaatcagatttatacctagctcattctttatgcattaaacattttcgtagtgcaacttgccatgtagagctgaaactgtactcgtgtaatttagccttttcaaaatgaggtctgtcatcaccaatgttagggacacgactgggattagggcgaggcgcctggggtgtagaatttaaggaagagctcactcgaggtgccagccctgtatctgcaagaccttgaggagggtgagtgccttcttaaattccacatctgatgtgcttctcttgcctcaccctcatcctacccccagtcagggtctttttttgtaggtccactaaaaaggtgcattgctgggtcagatccttggcttactgaatttctgggatgggggtagggggcagaaatgtctattttttttagtctttattttcttagtacttccaacacacattaatgtttagagaccttctgggcttggttggccaggctaaggaccaacaggacaaagctgctctgctagcctcgggttacaactggcctgagacggtagcttaaaaatctgcccaattaaccagcacacgggaacaagtaggccagccggactgcaccacttgccagccctggccgttgtgtaactgccaccaggtgtcacgctggaaggcttggatcttgagcacttatagccagagctgaatgtaattgattatgtaattttgagctgttccaatttttttaattaaaaaatgttttattggttcattattagctacacgttcaccgtaaaaaaaaaaaagagagagaaaataagtcaaaagaaaaaagtagaaactatccataatccttttacccagaggtaaccatcattaacatcttaaggtaccctttcagcctttttttttccctattgaattaatatttaattccactctaagaaatctaatcatctggattaggaaggatgggtgacaaaaggaatgtcgataggagggaatccatcttaagacctcgattccagtctaagtcctatcctgttacctttgccatctctgtgtagacctcccctctcacctataatctctgtgttaaagaagaattcacctgaccaggtagatgtgtggatagcttcttgtaagagtgggaatagagcccctaacacagcaaagtcaacatcgggctcttgtcccagctcccttcttatgattctaatcgaattccttggactccgaggaacttggttttttagaggggacttagtggttcaaacagctcttcctttgtgtgtctgccacaggtcagactctgctccgagttggaggtgcaatcagggagatgtggttctgcccttgagaatgtagagtctgatggaggaggcagcccaggaggttgtgtaagagtgtcaggtgctctcgcatgctgcgggaagagggaggagagaccaaccaacttggctttggagagttgaggatggcttggaacaggagatgacacttgaatggagtccagagagacctgccttatggcgcctgccgtcttcagcaaatagcattctcctaaagttccactgtttttttgtgttctgtcctacttttcagcacaatcacacagttgcccatgataattaaatgagacttgccagatggatactttcgcaagacgatggctcgtcttcttgctctatttgtgaaagctggcattggatccaaactctcaaggatgcccctaccttgagatcgctttggagtgccactcttttgtgtgtatttgccaaatggcctgcccatgcatcgggccaggctgagtgacaggtgggtgtgccatgcatgtggacactgatccccgccaagccgttttgcctgcaaggaggtgaggtgctgagaggtggttctacagtggtcccttcccttgaagaaatacgctcctgagcttccgatctgtcggtccctatcttctcaccatgtacaattttcctatcagttgcaacctaatcaaggtcagattcccaacgcgtggggttaaaacactcattatcacactatctgaagatttttagatcactgaagagaatattcctggtggcaaacacagttgaggggtagcaaacttgattaaccagagagggtaggtattccgaaataggaaatgatagctgaatcattaataaattaatggttaataaaactgtctcgtgtctgcgaaacattcttcctcctttgggtgctccatctcatttaattgtcccagcatcgttatgaaatggggactgttgttattcccacatgacacacgaggaggcttgatggagggacagattattggtaaacgtgggagccagcggcaggacacccttcacgccccccccccacacacacacacacagtggggtgcatcccattctgtgtctgatgtcatactgaggattcagggtgagcgcatccccgcccctgccatcagatccttacaggtcggcttactcattttccaaggcttagaccccttcacttatatttccagtagaacaactgaatataataagttcattttcctttcactttagaaaataatctcaagaatttgcagtgcttttaggcacccttgattgaatgaatatcagttgattattgtcgttccccagaaacgtcaaattagagcatgcctgctgatacaacctactttttcagtgattatatacaggtttagatagacatgtgaataaaactcttgggctggtttcctcttaaaattttctgtccatattttgcatttgaaatacaaatttggagtttaaaagcccatattgtattttactcttatgttttggcttctccgtaaatagggtgattcagttcttttatttccacccactcccttctgcccccacccctaaaaaggaggacattcttggagggggggaagtgggtgggtgggtgggggggcttctcatttcctagaactcctcttaattttatccatcccagtctgtgccataacttgaaattctctatgacaggttcagtaatttgaaagtctgatggcaagaatcttaaacacaatttccaccttcacaacagtttggaatcctaaagtttggattagaagcagtcttgaaaattctgcccccctaccccccaactggaagcagaaacccggccaggggtcctgtgaaccccacctccgttcactcaaccccaaacagggagttctcacctgcagtgtggacagtccacaatggggccaggcagctctaaacgggggaaaccctttcctggtctgaccctcgcttctgcctccctgtgcctttcactcactggttccgatgctcccctttgaatatgttccctcagggtcctcttcaaactcaagaaggttctaaggatttggaaaccgtggcggggagccttggtgaggtgttccagcagtctgacctatggccatttctcttttcctacagcaaaaccagaaatcctgactcatgaaagtctcacaaatggcatgctccagtgtgtggttgcaggattcccagagcccgcagtagattggtatttctgtccaggagctgagcagaggtgagaggattattttggctactacttaatgtgcacgagggaaggacagcagggtagttgaacttcagataggttttcagattcttttttttaaagctttgtttgattatcctttttctccctatccatgtggctttttaaggggggcataattgctatatttttcgtggtagacattaattttgtttgctgagaaatgattactgagtgacttacttctctgttttggtggttatcttttggatttatcatgcaatttctagcctgcaggtagataaagcaattttccaggacagagtaattagatttccattctgtacacaggaggcaatgtgtgtgggagatgtggctgtagttttcatgaaaaaaaaattgcctcagaagttaattgccaagttaccaaaaagtaatgatcgtgcagttacaacatacatatggcatttgtaagctgcgtgtttttaaaaggttttttttttctccttgattaggtgcccggcccctgagcagagcacatctggcagggtgcttcctctcccttccaatctgcacttaagccttaaattgtcctttcacattacctgaagatgaaaatggggtcaccatggctgtttttatccatcaaatgctattttgcgctcgggctttaaaagcccagtgtaacatcacaattgaatagtcaggataataatagaaattttatttctcacagaatagtcctttttatcacaacacgttggaagaggttacataggattgttgttttcagcggcgttttagtggaatgttttcttcggggaacagtaagaaggacccgaggcccctggaaaagcccctacagtttgcaggaagtaaccccagcagttactgttctccatacagcaaatatttatggggcgtcaattgtatgccagaccctggtctagtgagccaaacacacctcggagtcccagctttgtgagtttatatctaatgggtagagagaggtgagcaaaagatgaaataaacagttaagtgctaatgagaaaaataaagcaaggtataagggaatagaaaaatattaggtatatgggggacgtaatttaaaatgggggtccagcccctgatggatgggctttgctacctcgagtacaagccagtggtctggcctctgtctccctctaaaacctggatcaggatctcagctgctgggatttggggggctgacctgtcttcatccttgtagacttgaactctctcctcctctaagctcttttttcaaccctcacgcatgtaccctttcacacttactttataaagatctactgtgtgccagctactacctttcttccattcatttctaaccctttccgtaactctccaaagtgggtattaccatcccgaccttctagctgtagaaacggagtcctggagggttttaagtagcttgtcaacaaaacaggtatttgaatccggattcaaactcctgtctcactccctatttcttcctttccgccctgcttctcttgctcacggcgccaggggagtgctcatgcatcctcacacccttggttgaaaaaggacatttttttttattatttatttatttatttatttatttatttatttttatttatttatttattttgaaaaaggacatttctgattatgacctactctcttagttttaaacgtatgccaattccaatgtgattgattgattgattgattttcctagagtaaatccaggctgttattttctcttccctctagatgttctgtccctattgggccaatggatgtgcagatgcaaaactcgtctctgtcaccgtctggaaaactagtggttcagagttccatcgattatagtgccttcaagcacaatggcacagtcgagtgtagggcttacaacaatgtaggcaggagttctgccttttttaactttgcatttaaaggtaacagcaaaggtatatttctttttaatccaatttaaggggatgtttaggctctgcctgccatatcaatcatgattttaagtccattccatcaatggccatgtcatttctggtaatttccacattgtaccatgctgtcatcaaactcactaagtttcatcctgtactagtctgttaataacatgtacgcagtgattttaaccacatacatatatatttgcatgtgtatatgcacgtatgtatgtacgcatgcgtgtgtgtgtgtgtgtgtgtatgtagtgaattgcgtatttccagtcattcctactgaaaaggggcggggaaagaaaatagggaattatatttgcctcacagccagatataaccagaattagggcagttaaaaattttaaattgagtttaaaattttagtccttgaaaatcgtgtatttgaacacattgccggatgctatacaagaaagttaacattgccttttatgaagttatgtcagtgagccatttctttcgtgtctgtcagatttgattcatgagggactacctctgaacattaagtgaaatgatccttgtggatacattgatgaattggtatgaagttagaagacaaagaagctgggcatctacattcccagggcttagttttgttttcttgagttggcaaagatgtgtgccaataagtggtatacttccagtttttgagtaatgagggggagaatcttacattgttcttcatcacaggttttttttttccccctcaggcaatgaaaagaacactttaaagatattttcttggttgtaaaagaaattcttatcagtgtagaaaatttggaaaatacaggaaagcgtaaggaagaaaatataactatccgtaaaggaaacttcttaaagttgtccaaggcaggaatttagttgaaatacaaagttcatttataatgttgctttttattgacaaaacagccataaaattatttgtgggctacagaaatctcaacttccacagtagtctggtttgaagttgttccttcatgagatccctttgaataaccagaggaaggtagtattagcaaggcaaggagtttatgagatgcccttggctttgaatcctgccgtggtctgtaaggcgggggatgggtgagtttggggtcaggtggttgtcatgaagctccacccctgctaatacgttgtaattccacattcccctttcattttagaacaaatccatccccacaccctgttcacacctttgctgattggctttgtgatcgcagctggaatgatgtgcattatcgtgatgattcttacctacaagtatctacaggtaatcattcatttgttctctaccctaagtgctataatgatcgaaatgttattcattaaaagatgatctgtctctcttttctccccccaccagaaacccatgtatgaagtacagtggaaggttgttgaggagatcaatggaaacaattatgtttacatagacccaacacagcttccttacgatcacaaatgggagtttcccagaaacaggctgagctttggtcagtatgaaataggggctttccatgtaacctttttgtgtacgtgtaacaatgactttagggaaccccattagcttcctttgttctgttccaactgagacaataagtattttctgtgaagtttcatcatttttgatagattcctcataaagcaccttatagagaaatgtccttagctggatttgtccttaattccttaacaattccttgattgttgactttgaaattacccagatgctcctttggtcctatcaccaccccttactcttttcttcctttctgcagggaaaactttgggtgctggtgccttcgggaaagtggttgaagccactgcatatggcctgattaagtcggatgcggccatgactgttgccgttaagatgctcaaacgtaagtttctgcaggtggctgcatgccctcaacattggcttgccaaatttgcttcttgctaaaatgaaatttttttctgattttagcaagtgcccatttaaccgaacgagaagccctaatgtctgagctcaaagtcttgagttacctcggtaatcatatgaatattgtgaatcttcttggagcgtgcaccgttggaggtagggccatgaccaaattaactttcattatctttcaattatctgaagaggggagattttaataccattgcgacagtgcttggttatatcttattgcaggattttacccgggttgttacctcttgtagatgtttcacacccctgccccaaaagccattcttaagaatgtatatttgagttttatcatcatggggacataccctagttactgtcatgggcgttgcatcagtatcaacctcttgagtatcttgagaacctctcatctcctccagaaaacttttcttttatctttcaagctattttactggagcctatctagtcactaaagggttactatccataattaaagatagactttgaagcctgcaagttctccagtacacaccaaatgagacaaacacttcacctcggcaaaaaaaaaaagtaaatttccagttggaagcaattctgaggtagagccttccatcaaggatttctgcgatgtttccagaaaaccttttggtctaaaaggacagagatgtgtaaaatgagccattcctcaagatgtactgaggttcacggtcaagttgacagcttagctaacttcttaaaacagcccctataaatgttgcttccacatcatgacctgttggtaaaaattcctgcccaagttaatcgggtgcctgttgacttcagagctgcagcgtgaggtttaattacagccccggaaacactggtggccggtagtgctcagaaggcaggtggtgtcctggcgtgccaggtgctcaccctctccagggtcatctcagctggccatcctgtgctgtcggttttcctctgaggctgcactttctgcccttcatcatttccataataacacgaggagagggtgtgaagccctgttgcatatcgaagtggatggaaggattagtgcaggaaattatgatgattgtaggatattgttgaaagttggtaacttggatgtaagtcaggccaggccccgagcactgacctcacttaggaaggggtaaaaggaggcttacttgttgagttgtcctcctcagaatgctggtttttgctaagcctgctaagtatttgccttatcaatgaacctgaatgaaaacggtcatgatggcccctgagtctatttaaagggggcaggatcgtctagagagctcacctctctttaaccttctcttacatatctgcagggcccaccttggtcattactgaatattgttgctatggtgatcttttgaattttttgcgaaggaaacgtgattcatttatttgctcaaagcaggaagatcacggagaagtggcactttataagaaccttctgcattcaaaggagtcttcctggtaagactgatttacataaatagctgtcaacaggcagttcagggggtcgaaagggtttgcaatcaaggctgattctttaaacaaatgaacagaggtacttcgaggtgccaaatcagaattattaaatcatttaggtgtcgtcaacaatttagaaagtttgaatagcgtttgtaaagatttaaatagtgttgaacttagatttttattgatttttttaatgcatctttagttttttttttttcaaagtgttctgttcaattgaataattctgtacttgtttcacttatcagggctctattctcgtgtgtcctttcatttattctgttgggcttggtactgtatgcatctctgcagtgagacactgtagggaaaatgctaaagtctgtcaagttgtctcggtaaatttcttgaaaacctttaacggagtggcaaaagagctctgaacatatctctgcacataggtttctcaccatctacctctgaattatttccgtataccttgcccttctttaaaaaaaaaaaactcaatcatgctataaaaaggcacaacgattctagcacgtgtttaaaaattctgtaccttattttcatctcttttcctctttaatatccttctgaatttgaatgacgtacaaagagcttcagattcctttaagaacaattagtgtggcttaacaaccagaataggattcctctctgcctagccttgcctgttctttccaaaggttgagaaagatttcctagatgcacccagcccaacagaaatcatattcatcatgcccaatcccttatactttatatttttgaagttgtgtggtggattttttcctctcctttctattcgttctgtcccctacgttttgagatggcaagactgtgtttcttaaacttagctccaggccctctagaaggcctcagcaactattattgatgggtggttacttcttaaagaccttttctgtaccccttgactaaagggtttcttcaccccaggtgaagccttttcattttacttttttttttttagtcctatagacttgggtagtgtcaagtggtagtaaaaacacattacaaaccaccttttgttagtttctccagagcatatgctccttatgtgaataaatgagccactttgccttatttctaaaaccttggccccatacatgtttttcaacttgctgaaataatggctcaaattgttctatccgatgtcgtgttctttgtgctttgggatcccatatgggactggaaccaccagcacactctgaaggagattgttgtcatagtgtttctatgctaatcagaagcaggaagtactagaaatcttgaagactttccagccaaatgttgcagattcaagaggtccagatggttcagaaaatcatccaaattattggtgtttatctgaactaaacttggtttttttaaaccttcttccatcagtcgctctatgttagcgatccctgccttcctccccatcacacatctcagagctcttgctcttctcgtctttcttgtgtctttcatcttgtctcttggggctaatttagagactttgagggaacaggggatactgtttatggttctctgtttccattacacctctggtgtcaagagatgggacatttctaacgtgagtcccatctatgaacacaaaagagaccgtctcattcctgggcatcgggccctgatgttgaatattaaaaactcctgtataacgaacaagcttttcttcattcaaacctagtaatactttctctgaataaaatcagcctcttacgtaaaaagacagtggggagatagagcctgccccatgggaactcccccattttcccattttattcagtcataatttgatggatggatatttcatctctcacagcagtgacagtactaatgaatacatggacatgaaacccggcgtttcttacgttgtgccaaccaaggcagacaaaaggagatctgcgagaataggtgggtacctatcaaataataaaaagaacttcatttacaaaggctttctcatgctgctgggaaatacattactatgccccatagtgactggttctcctttccaggagggcccgatggcaaaagtcagtggcaggtcagggttccaagtgagcattggggtgagagagtgttcattatcgtataggagcatctcactgcatgaatgaagatatatgtgtatcaactaggtattttacacatcaaaaaaaaaaaataggagatttgtgtatttatccaccatccttctcccctgaagccccagactgtgaatattaacttggtgcttgggcacttaactttcctcaacgccgggtgggtgacttgcctgcgcggtcacatcagttccttattaccaacctttggtattgttgttgtgctgtcttctgttttccaagctttgaggcttaattgctaagaaagtccttcttctcttaacaggctcatacatagaaagggatgtgactcctgccatcatggaagatgatgagttggctctagatctagaggacttgctgagcttttcttaccaggtggccaagggtatggcattcctggcctcgaagaatgtgagtggatgtggttctcgaggagtattgccaaccccccccccccaatcccctaactccagtggcgcattttagagttcatagttagaatgcacagtgtcattttgagaatgcacagtgtcgttttgaagtgtggtaacccaaaacaggggaaatttcatttcttcatgttccaaccgctatctttttggaattcctattctcatttataagctttaaagtataagcctgtctaaatgaactttctatgaatttttttttttttatgcagcaaattcatttaaaaatcctggctcttagaatacaggagctgctcttagaaaatagagaatggtttcatcagcaaagggaggcgttacctcatgcaattgcagtgcttggtgaagcacatgcttgggtcttgttgaagttgggcctcagatatcgtgtggcttcatgaagtgtgggggaataaggaatcggagagaataataagcatttgggaaaaaggtagaaatgggaagagaacgaaggaaccaaagcaaggaacatggctctggaagggtgagaggaattcagtagcaaatgagactagcagaccaggaggagggaacagatcctacccttaagtgtcattggtgacatttccaaacaattacgaaactaaaagagggatataggatggctgaaataaagagcctcttccctgtgtcctcgggagacatcaaattggagttgcaaagacattttaaaaactctataaaaggacattcaaagagaagcatgcaaaatgaggttttggtttaaaaaatatgatacgactatttataatgtattttcctatgaatgaaagcaagtcataagaagaaaaaaaaatttattcgagttggtttggaaagcgattatcgtaattaaggtcctaaacgatgtgaaacacaaattttgaacatcattcagagcataatttagatctttatttttggtgcaccgaagagtttcaaggcaaagccaaggtactggatttgtgtgacatagcagcattctcgtgttgaacagagttttcattcttgaagagtttaaaataaatgtaaatggttttctttttctctcccactctcctaatagtgtattcacagagacttggctgctagaaatatcctccttactcatggtcgaatcacaaagatttgtgattttggtctagccagagacatcaagaatgattctaattatgtggtcaaaggaaacgtgagtacccactctgcttgacagtccagtgaaggattttagtttcaagtttttctaagaattgctttttatgagtttcctaatgcaaatcctacctttgagataccatgcattttagcagtcaaattaagtgtacttcagcaaaatttgcatggtaggctgaacattactacaactaacattccgataatagaattcctaattctaattgtgtaattatggggcatgtgaaggaaacagaaatagccttaattttcattatagcctgagaatagcaatgaactctattttgttcaagtgaaacaaatgtgggcctgaaggtcacagcaggggaattttacttggagattgacatgctatgcgcaaaagattaaaatctaagataatgttcagaattaggtatgtagaatgttggatcttctaatcaatagagagcatattaaataggttcgtaagtaataattgggttagagaacatagtgattttatttcaaagtgctttatgtccctgccaattctccatgtagcatcagaacaagcccctggcattggagtgcagtgtcttcacattttcagcgttggagaaactaaagctcagtctattttatatattttagtaataagcatcaactaagtctgacacaggtcggtaaaggctgaaaccagagcccacgatctccagagcaacgtcccattagtatgggaagccatattagtcctgtatctatgtattcttctacatctatttgcccagacccatttccccagtccagatttatttctggaggtaactatttatgtgccttatgataatgtaatattttctcctccatcaccatggcatctctgtacttgacttggttttgtagaaatgctgctggctttacttcctgatcaaatcatgtatttctttccttgtttgattaattaattaattaatttatttatttgagagagagcaccagcaagggggaggggctgagggagaaatagcccgagcagggagcctgatgcaggggtttgaccccaggaccccgagatcatgacctgagctaaaggcagatgcttaatccactgagccacccaggtgcccctcaatgcatgcatttctaataaacctcttctaagactaggttccatcattatgagggttaatggaagcaagttctcttcatcctggtccatgcagtattggaagaaagaatgaagggcacgaggaggaaggcagcaggttcaggacccagtctcccccagtttgaatctggttccgtcgttaggtggctgtgtgttattatttggcaagaattacccagtgcctctcaactttgcttgttttcctcctcttgggaataataactgtcacctgactcatcacgttgtgaggattaaatgagttaatctatgtgaagtgcttaaaacagtgccagccacattgcagctaatacatggcacttgttcttccgaactgttctttatagatgtctgatttggaatataaataatcatgacagtggttgttaggctgcagcttcttactagcttgttactggttagtgaccatagttggaatggaaaaggatgggttaggtcccaccaggcttcaagatcgggggctccagctcagggccattgaactaaccaattacaaatctctcctcaccaagctcacacagcttgttaccaccccaaattcactatatccacagtcactgagatgtccctgtgtcggtttctcggaaaggtctttcacaggcccctgaacccaagacacctgtagtaggtctcaggttaagagcccccatgggagtattagcataaaatctgggaaggggatactagaaggctttcttcctatcttttaaaaatattttatttatttattcatgagagacacagaggtagagacacaggcagagggagaagcaggctccttgtggggagcccgatgtgggacttgatcgtgaccctgggatcacgacctgagctgaaggcagatgctcaaccactgagccaccaaggcacccacttgctctctttcttactttcttttttcctgctggctaaaataactttaacgctagaaaaaagatggtcttcccagttttcaaccctaaatggattaagagaaggattgatgtagctttttatggtagattaagatccaagaacccacagtgtctataagaggaatagtcacagcaagtttggctcaattttagcagaaagggtttgggatgtgaggttcagctgttgaatttaaaacccgaactgccgcttgccaccttggaatagtcatggtcaccataagcccctactgttcattgtgtgtctgcttatgcgaggcatttgcttagagattagtgagtcagcagtactgtgctaagcacctttggccacccacacgatctcatttaacccgcaaaatgactcatgaaatttgaaacgttatttcttcttgacacaagaacatattgaggcttacttacagatacttaagtgacgtttgcaatgtatttgtaaaggatagtttgggtttcgtatgagagaaaacccaaaagaagagtcaaagaagtgtcgtagtcataggccagaacaggtgtagagcttctgtgaagcactagggaccaagtccttctactcttctattttcttaccatggctggtgtggccctcctcgttgggccgcgatggccaccagatagccagccaccagagccagaggcaggatggaggagggacaagaaggaaaagagcaaagggcacatgccagccatgtcttaagaaggcttccctgcacctgccatatcatacttcccacttagtggctgaccctgagtcacgtggctctgctaagccgcaaaggagctgggaatgtagtttttattgtaggagggccatgtttctcttattaaggaaaaaagggaaaacatattcagtggcaactaacaaatctctgtgttaatcaaggccagtggtggagccaagaatagaacccatgtgtctgtctctgacatctgtgctcttaaccaccatgctgtatggactcagggtgccccccgccccgcctttttaaaagattttgtaagagagaaattgagagggagagagagcatgagcagagtgggggttgcagagggagaaactgactccccactgagcagggaagtgccatgtgggacttgatcctaggaccccgagatcatgacctgagccgaaggcagacacttaacaaactgagccacccaggtgtccctcaatgttccccatcttgaagatgagggtagtaccatgtgagccacctatttcagaagtggggaggagtcctctgaggtcatagggtaaaaggcctttgtgagatggccatcaccttctcaccctcaccccctcagctggagcgatgtctgtaggaatactttctattctttctttcttttttttttttttgaacttcttaattaacattgccggatctgttgtgcttccattacaggctcggctacctgtgaagtggatggcccctgagagcattttcaactgtgtgtacacatttgaaagtgatgtctggtcctatgggatttttctgtgggagctcttctctttaggtaaaacgcctgggcaaaggcaccttggttgggcgagagcatcttctttaaggggttagcagggtcctgcttgcttattattaatgctgatttgcaaaccgtttgtgcctcaggaagcagcccctaccctgggatgccagtcgattcaaagttctacaagatgatcaaggaagggttccggatgctcagccctgagcatgcacctgctgaaatgtaagggccgagatatatttcccttgagatcatgcttctccttttattttccttttcaaagaccgaaacctgagtattgagggttttcactagggtttcatggtttgaaacagcagtgtctcctggttccttcttatgacatgtcgtgatcaaatgtcatttttgtagcttcttttcataatctcttgtcaccaaatatacagaaagtttcagcagcctttcacatgcacggtgttttagttcatgcgtgatatgtccagtttgcatggccctggaattttttttgagactgtcgcatgacaccttaggctaagggcgttgaggagtgacaggaaatggtcctcgctctgcaggtatgacatcatgaagacgtgctgggatgctgatcccctgaaaaggccgacgttcaagcagatcgtgcagctaattgagaagcagatttcagatagcaccaatcatgtgagttcactcccgccagccgtagaacctccctgctttctcctgggattgtcaggctcttggggttctgttacccatcccttctatccttggctcaagcagtgtactaggcttcggggaggctaggaaggcaatggaaacaggttcttctggaccaacccccgtcctgagcctgccatacagatttgccatggttcctccccaccccaaatgctgatcatggggtcggcgtggtctctgcctcacgtgtctgggccattcagccttcggacggttggggtaacgtgaactagaataaaagcacagaaaagacagcttgttacggcagtgaaataagccttctgctcaaacaagcatagccagaaatggcagctagctgtcatgcccacaagccatataacatgaagagctttttgagtttgggagatccctgccagtgatttaggggagcaggggtggaattcaacaactcaaatccattatttctcctccccctcttacggaagaattagtgatccttactttaactcagatttttttaaagctgctttttggatggattggcctggagctatcctttctaaaagcataccactggtattttggggttaaagcttgctcttttgggtgtcagagcatgtttcaaattaaacagcgttccccacctatgtgtttattctcagcagagggcccctgggaaggccacccgtttcccagtaaatgacatcagccattgggttatagttggctacagaggtttagaaactcttttaataggttagatagtacttgtttccatatgtgtcccagcaaaaagtaaattttttttttttggccatcacgtcttatgcatcagaccttgggggaaatgaggaataagacaaagcttatattttctttcatcaatatggggttttggctgtgaaagtcttgtaaatctcttctccttaagaagctttgtgagttatttgtgatcctgagaatgcagatgtgccccccttgttgctgtgtccgttgtggggactggcatattaactgtggacttgttttcctcagatttattccaacctcgcgaactgcagccccaacccagagcgccccgtggtggaccattccgtgcggatcaattccgtgggcagcagcgcgtcttccacccagcctctgctggtacacgaagatgtgtgaagcaggaggagtgccgggggtctccccaacaagagcgatccctgttcttttggttcctatactggttattctgtcctccttcggcttgcatcctattccagggtagcggacacccctctgtccctccctctttacgagcacaccctaattagtggccagtgacttttgtcatcagccaccatcctgttg

SEQ ID NO: 22 - DNA, 79957 bp, Equus caballus
  misc_feature (20990)..(21009): n is a, c, g, or t
cggctctgggggctcggctttgccgcgctcggtgcacttgggcgagagcaggaacgtggaacggagctccgatcccagcgcagccaccgcaatgagaggcgctcgcggcgcctgggattttctctgcgtcctgcttctcctgttccgcgtccagacaggtgggagagcgccgcgggcaccggggccgcgccccctggccagcctgggcccccgaggggtcgaacacgctggtgtgggtcgggagagggggctgcaggtcgtccagtgcccgcgcgtttcagcctccgggaagattggaggcgtcgctgggactttcctgcgccctgccttgctcacctgcgcgaggagaccgcagcgctggtggtgggcacgctgagctggggtcctccagaaatgagggcagcaagggggcttaaccatgagcgaggtgcaggctgagggcagagagctgcgtgcgagtttggggttgcttttgtgccgagagtgcgcgggggcaccggcgggcgggtcgccgggtcgcacccagcgcgttatctccgccgtgcgaggcgcggccgctgtttccttttgttaaaagttgcgcttgtgtgaccggcgccccggaggaccggcctgcaggttctcagctgcgccgagggcaaagttggagaggcttttccttgctctgcggctgctgctttgcacaccgcgggcactctttgtgcctcggagctgaggaccgacgcgctgccgcctctgctcgcggcgccacccgtggacgcgagtcggaggctgcggcgtcccccggtcccctggttatgctgcgccgggagcgcgcggtgcggctctggggcccgaccctgcgaacctggaggtggcggttactgggacaacttaggcaaggcgtgtggaaagcagccgctaggtcgcagacttttagcttttataaatcccgtgcgagaggctcgcccctctctgccgctttctttcctgccacgcgcctcgaagcggctggtggctgcgtttgccgcctgctcccggggaaggcagggacactgcgctggaacgccgcggtccccgaccccggccgcctccgtcgcccggccagagtgcctggccaggctggcggggctctgcaagccccgtgaaccagtgtctgcgacctgtaatcgcaggtccctgttttctttgggaatttggaggtttgcaatacccctcccacgtgatatcaatacttaagggctgcccgaggtggggggtgggagatggagtggaactttctgcaaatcttacttggatcttaaagctgttaagaaaatccggttatatctgcgcgggaacttgggtcttaaggcggcggcggcggatttgcaggttcctgggaaccctcagtcagattcctgcccattcctcctttttctctgggtgtcgctggtgcgcgagcgagtgcccgtcgcccagctaacccctggaaccctgttttctcccaggtcattttttgaaaaaacctttacagctaccctgatggtgtaaggatggagtctgaaccggaattgaagggctccagagggagcatcgctgtgaactgttgtggggctctatcgactcccggtcaattttctcgtaaagtctcaagatgcagcctccgccttcctgagcttggaaggcattgtcagggctttcctgtggggggacgaggggccttgcatctggacccctgtgaggtaggagggatcatgagtgagtgtccggattccgtggcggatttgaccgcctaagcttcaagtgacatgtttggtccctaaatctctatgccttggcgtttttaatttcagttaaggtgtgtggaccggaggggagtagggcgctacaaagacagaccacacagaatatttcctttttgaaaattaaatgagtcaattgcttccttcttcctcatcattagcctgctccatccaatagatttttggcaaaggaattttaaggtccggctcctgggggggcactatgatgcccttctgcttctccttgtctcagccgtttattgcctgtgtgcccttgagcaggtcgcttaaattctggggagcccaatttcctcaagaggacagtgaggcatctttgggtccaaaattctctaattctctttcagtcttctgagtgtagattctgcacttctgaactttttccctgattccttcctacctccttgaaattcctctgcctcttctggtcagagggaccacttggtgggatcctactggtctccccctggctaaagcagggaggtgtggttaggctgccctctcctcaatccactcacggtggcctgcagtttccctttgaaagctaggaggtgccaactctgcaggaccctccatcccctccctcctcccccctagtatttacaactcctatgcccagcaggatgaacctgcaaggaattgtgaatcataccttctccttgttcctgcagatgtgaggctggagtcatccctggcagctggacacaggacattctggattgttgtcctgctggaaataacatgatggtcttggaaagggatcccagataaatcatttatccccatcctggtctttcctgctcatccacatgtttttccttatgactttataaatcacaaatgctgtgcaattacaacacgtcttctaatgtgccttaaatttcacgttacttgtgtgttgtacattgttgttgctctttaattggaaactgccaggcctttggtggggcctttacctgacgtttccagtcctctcaacaaatcctgcaggtagataggactggtaccatccctaccattttacagctggagaaccgggctgaggatgtcagttcccagaataatcagtggtgaaacctagcttggccccatatgcccaattgtacatccattcacatgacttacccattcgaaactgtttgatgaggacctattatataccaggttctgggaatacaaggtggccaaggtcattactttcccaattttggtgaaaaagccctagaattgcctgtcttatgatgtctgagtaagagtgttctagtttgaggaaagtcattaaattatagccctgagtatgaggcctttggtgttagctgtcccattccagttagtctctgagaaatgaagataagctggctctaaaatgatggtgtgagccagttgaaaattttctccatcctccgctccccaaaataaaaaatggtcttagcattatatactcgtggcatactcgtgaaagataaaacccccgtggtggtaacaccgttggccctttgccctggacaggcacgatgagctatcatggcagtttaccattcatagcctttcttctcccaaaacaaattctcatcagacgtgtgccaagtattttgtgtgcttgccctggagcacgtctgtgtacagatgttgtggtgatggattttgctgctgttgttgacggctgctagaagctgcccttaggattttgactcatttcctcgagtctctcccagctgattaaaggaggacatgaggaaatgagctgcggtgttctgagcggaattctcgaagctaggctcggggtagggacccctccaaggcagtcatccaggcggcagcagcgttttctctaaaatgaacttagttgaacagtcaacaagctaggatgtgggaagtgctttattttgctgcattcgtgtgtggtaacttttgaaaaaagggattgaaagacatttgaaagaatcttaaatatgcagaatttcatgtgcagtttctataacttgaatagatattttcatggctgcaaagccagagtaaagagggccttcaaggggtgttattagaggcaaaagtttgaatctagagcaaatccagtgtaagtctttgttcagagtcggcgggccttgtgagtaagcctggcttcacagctctgattagtgacattttggacatgagacagcccatcttttgacttcagactcttaatgagtaaagagaagttgcaagctgacagtccatagatgtgttttgtttggtccacatgatgcttttttagaaagcatggaggcaatatttagaaattgggagaatttatattaagacctgggtttctctgtcctttttttattttttattttttttaggaagattagccctgagctaacatctgctgccaatcctcctctttttttgctgaggaagactggccctgacctcacatccatgcccatcttcctctactttatatgtagaacacctgccacagcatggcttgccaggtggtgccatgttggcacctgggatccaaaccagcaaaccccgggctgctgaagctgaacgtgagcacttaactgctgcgccacggggccggcccctctgttctcttgaagcattgaatactgcccttttggatgggacctgtgctcttcaggttgctctgggcaatactgcgctccattgccagcctgtagacatttgggcatttatcctcgggccctggtgagcacaggtgtgaccacagaggtacccagtagaaggggcacaggcccaaggagtgaagacagccttgttctagtctcctggctccatggctgacagctttgttgtgttggagcaagttgcttaaccttgctgagcttcactttttcatcctagttttagctgtgtgactttgggaaaattacttgacctcgctgtgccagtaaatgtgttgctacatatacagtttttagaatggcgttgcctggcacactcatagtacaagcttagtacatgtcagctataattattatctgtaaataggaattattatccctaaaatgggaataatgcctactctaatatgattaccctaaagattagaaagacattcttgtagagatgcttggcatagggtctggggtgggagaggcacctaataatgagtaaactccacaagaacgtagaatttgactatttctctttataatccttgtgtgaagataccaataagtactaacatgacagctttaaaaaggaaatcaattttaatttttgtcctgagttttatgtagcttttgacataacagttgggaatcactagtcttagagattgaacagaccttggacttttttttcccctgggggaaaaaaacccagaagattcctccaacgctaacattcagacctgctaatttttccattcatcttgtgcttaggcttcctgcttacatttggctctgacgcttgtcagatatcttccagtgcatgcctttctgacagctaggttttcaacacttttgcaaactgtaaagtttgagctcaattgtcattccgggcatgtggcatcggaggtaagaactcgggctgtgaaattgacgacctgggtcttagccagtttggccacttgccagcggtgtgatctgggatgagacccttgcctcctttatttcctcatctgtggaatgggggtgatggcgtagggctactgcgaggactatacgaggtcatgctcggagctgcctggcgtggggaccctcacaggaagagcacggggacttcactatcaggctgaccttatgttccgctttcagctttctcttagaacaaaaaaaaattgaaaatgatttaaagcaagattatgtagagggctttttttgggtattaagatgaagtttatacagttaatgtgtagtttttaaaagtctccagttagtggtaatgcatacttctttctctggttctttgtttaaacttagtcggctttccaccaaagggggcacagatttctgaataaaagttgagaaggggaagggtctgtaaatgaccattttttcagggtgaagaagtaagcgtagggggccatgaactctgttaccttcaaggtcaaggtcaaggtcaaggtcaagtggctttgaaagcaccctgagagagagcagcttctccgtgactgccttccctgggcgcgaggcccccagctgaccttgtgcattagcagttctcctgtctccagcacttgcagcgcgctttgaacataagaaacgctcaggaaacatttcagattcagtttgacaaaggtttctcaaccttgcagggaccacaggtatccgctggggtcgggtggggaccgggtaagtgcacagccaccgattcagtggaatttggtgtcctaagaggctcaaagtgcttgcggaggtttcaaaggcgagaggaatttactcttaatgggcaggcaatagagacccggtgtcagtaaaagtgtgcatgtgggaggtaatatttgagatgaatttctgcatcttaaaagggcggagagtgtagttgaggcttcagttggaaaaatctacagaaacagggagcaagacgtgaattaagatctcctttgaggattgtcagatctttccattgctgtggtggctgggggtagaaaattggagggaagagcctggaaagaggagctctttgattagcctcaaggagcattggagccagggtgtattctgtgttgcattgggtccagattctgaaaacagctttgaagtcaaggccaaggtggacttgacccggtggtggccctctgggctttgcctgctggcccagggctgcttgctccatccttctgtccagttaagcacgctctccagcccccttggaaaactcagacgcccacttgctgtggatggccaagactaagggaggggttgtgtgtgtgtttaaattttagtaaaatacacacaacataaaatttaccgttttaaccatagttagatgcacaattcagtggtgttaagtacattcacgttgttgtgcaacccatgtccagaaccctttccatcttgcaaaactgaaactctatacccattaaacgctaactcccttttcctctctacccccagcccctggcaaccaccattctacttttctgtctctatgaatttgactactctggggacctcatataagtggaatcataaggtatttgtcctattatgactcatttattgtacttagcacactgtcctcaaggttcatccatgttgcagcgtatgtcagaatttccttccttttttttcttttttctttttctttttttttggtgaggaagattgtccctgagctaacatctgtggcgatcttcctctattttgtctgtgggacgctgccacagcatgacttgataagcgacatgtgagtccacacccaggatccaaaccagtgaaccctggggtgctgaagcagagcacagaaacttaaccactacgccacccgactggcccaagaatttccatcctttttaaggaaggaaatgcatgtatatgtatgtgtatgtgtataccacacttggattatccattcttccatcagtggatacttgggttgcttcctgcctttggctgttatgaataatgctgctgtgaacatggcatagcatatctaagggtgagtttctgacgggcttgttttgggctggttaatctatggccgagagccgtgttggtggggagctggacagagggatgatcagttagactctttagatggcatgtggatgaaggagtgagggcctggatgttagggtacgtgttctggaaagaaaagagcgcacccaagagacataaggaagataaaggtggagacttaattctcttagcaaattcacgggcacgttggacctgtcaggcactgatgagattgagaggacagggagcaggagttatcatgggtgcaggtaactgggagaactggtggttctgtggaattaatggaaatcaagccaagaagaggagcagcccgtgtgagggagggaataggatattggactccagtgtgtctgttcattgattattttcagggtgcatttacttgaaactcaatttcccagacctgatggtagatacaaatgaaagtcttcttagggtcaggtccatctaagaaacacagctaaagcccaaaggtcactcaacatgcctctataatattttagaatttggggattataaagaattgtgggttgtgtatcagtcatataatgaaatgtaaatgttcatgaaaagaaataaatagcagaaaaataatcttgcatgtattctctgtattaggccatttttaaagtaagtttattggtttcctcagagaataaaatggacattttgggtatagaaaagaacgtagagatgatcaaagctttgggaaataggccctttgaaagcaacttaaagaaattggatttattaagcctggagaagataaggtgaaggaagatcagtgaatgacagtcttcaaatatttgtagtatgtgagtgaagaatgagacaaaatgagaggagtttaaattgccccagaaggaaactgagattttttttttttcgtgaaaattctttaattggaagggttggaaaagactattgcattcccagagctggttatagggtcttcgctgcaggtatgaggaaagccaaataattgtcattttgaaatggttaggtcacgcccacctcaattggttccatgaccctctgagggtctgaaatcttttctaaataaaataaccagccgtttttctttcttcactgccttggcagtggggtagggtgtttttcataaattctgggtagacttgaacatgatccactactctcttcacggtttttgtgtatactgaaaatagccagtaaagaacccacagcctaaaaatgggttattgatctgttggggtgggcgacctaaccacagaatgaagtgtgcagtgtgatagcttaagctgagtgccaaaataagaaaaacaaaaggaagttcgaggtctagagaaatccataatcgatcataattagccctaacctaagaatggttgtgctctgtgatcacccaactgactggtaattttgagatacggccagccttgctgcatgtgggctgaaagatctgtaagggtgaaggaaggccttttcccttgattactcaagggtaaatcgttcatgctgtggtttacccaccaccctgatgacttcccttcccacctgtccttttcctttggtcatttcatggtcatgggtcaatggcaacattagattggccagcagtctagtaggggaaggtgtagaaatgaaatcgcgattcaccagcttctagttgattataccatttcacctgtcatgtcaaaatctatgatgatgtccgagacgtgattcctgcctttaaggagccaaggatctatgggaagataagtgctggatagatgctaatgtaataagatctataataggatttaaataacagtcttggtccagaagccaggagccataatcatttaccattgggttggaggaatgggcatcacttcttgagtagaatggctgattcagaggaagatctgggacctgagttaaatcttgaagagtgggacaggaattggtcaaggggtgaacagcgaaagcaaagggttacagtcacccgaagactcccatagaagagtctgtggagactagcagaagatgggataggatcatttttagggcacctggatttctgttcttcagtaattgcagtatttcctacactgccatatatggtgagattttgtaagtttaatctgatcaagtagttgctttttcagagcaataactttaagaaatggaaaagtaaagacctcacttttacatgtatcacgtatattgcatgtacattggaaatccagagtagattccggcacaggtactttgggttgtttttaagtccagggcttattaccctcccccaccttcctcccccatcacccccagcccagatcacagattttatagactcgacatctgatagtggcaatagatgatctttgattctttgcttattagcagattttaaatatttagtaaaatggtaagctgggtatgtagcagactgcatacattcatttgttaaaaaacaaacaaaccagcaacaagcaaaacccccaagccttgataagggttctgggtggcttaggacatcttgagattctgctctgggttcccagccctgcattagaaggtaattagaaggtaattagggccactggttcctgccctcccccaagcagtgagcctcggggaggggggaggcggtggctgtttgtgggaggcagaagcctgttccttacggtaaaggtatgagtgatggcacttgccagggaatgccttgttcttgaccaagtggaaaaaaataatagagaaaatgaaaagaggagaaactattactccttttcctgtatctttaagttctttagtgaggcaaaacatctggcttcatttgggtttaccccaggtgactcaggttatttcaaagggtgttataaaattcttcagtacaatcccagactgctagtcatttaaatataatggcctatgtagattcagaagagttgcttggcagagttagaacaaaggaattgttatcacaaagaactttggaaattatttggtgtatcattttattgcaaggaagtatttatagaaagacatctaatgtagatttgacttctggggaaaacatttactggcgattttagaagtgtgaaaggtggctggtggcatgggctgttatcctacatggttagtgcatgtttaaaagaaaacaaggctatgttttagaataaaaaattgtgaattattctacttggaaagactatgagtacttttaaagtaatacaattttttagcttgtaaaatgttttaaatgggtttccatcctaattttcacaatgtagatttcttttttaatggctggagtggagtgaatgtaccttggaaagaagtggcctggtgaaacctcatggactggtctttaggctttttgttgtcattaaaccaaaattctttttttttttttaagtttatttatttattttttgaggaagattagccctgagctaacatctgctgccaatcctcctcttttttttgctgaggaagactggccctgagctaacatccatgcccatcttcctctactttatgtgtggcacgcctgccacagcatggcttgccaagcagtgcagtgtccgcactcgggatccaaaccggtgaacccctgggctgctgaatcggaacgtgtgaactcaactgctgtcccaccaggccagccccaaaccaaaattcttaatccaaaatatgtcattagaatcaccacttgaaaacggttaattgggatgtttaaatgtttttctacttattttagtatagtcagtatatttactgcagagaaatagtagacaagtttctagctcaaccaaaatgcatcactttcataaaaaagcacccccctctcctgctttttaaaataaactagcatatgtggaagggtttatgaattttttagtaggtctgaatgtgtagcctaatttacatttgagcattttcaaggaatattatttaaaaggatcaccttagtttcagaactgccttctaaagggaggctggctaggagagaggatgcccaacgagccaacgtggcgggtggcatgctatcgggtgaggaaaacccaaagcagagggcagtgggctctgctctccatagggaaacctggcacgcagctctggcctcaaactgtgatgcttaagatttacagcttcattcccttgggcccttctgatgtcttttaataccaggaattcatagatttttccacaggtaatattgaggtgttggggctgtagcagtgaacataccagacaagaatccttgtctcttggggcttgtgttctagtgaattctttttctttcaggagcccaggcccacactagcccaggaagaaagtctagggtctctcatagaaagcggcttaatttagatttatttcagttccgtattatggtcaattaaggaaggaagcagagaaaggcaaggtctctcagagggtcaggtggtgggggtggggggaatgactgggttcacagggaagaggggtgagaggaggcaaaccaggagaacagggaaaggagagagatgggggtggggacagggctaggggttcactcaggaggagctctctaagaggtttgtcacttgagtcctgtctgccaccggtcctgccctggaagggctgaacactcatggtggttccagctttttcctgctccggtccttgtggcttcagagccgccagcctcttgagcaggtgtcctgatgcaagccttgccgaagagcattgaataagtgtgtgcagtgctgggcaacacagacaggtgtcttcattttcaggacctcccagagcctttaatgtgccagagtgcgttgtcagcctgtaggtttggaaccatttttctcagaagataccagaatgctttttcacagctgagagagatgctttaggggtccaggctgaatgctcttcagcgggtctccaaggacgggcagttctgcacctcctttgcaaattctttcctctttttcttgttaaaatctgaccgtctttggtttgaataataactatatcccacagatggcactttgtgtctgacagagcgccacttagccactgtcagtcatactgcgcatctcgcttcaactctgctgttgctgtgtgaggggacatcaggttgacttcctgatttcttgcattttagccttagggtggccttgcagaggtccctaaagtggtcagctctccactttcaaatcagggagttcccaaaatgagaattgacactgctgaattactcaggactgggaagttccttttctgtcaattcttgggcatggagtaggacttttgctgccctgggtattgttaatgttgatcctcaggaaggaatccaaggtaaagactgtttaggggggctggccccatggccgcatggttaagtttgtgcactttgcttctgcggcctggggttcgccagttcggatcctggatgtagacctactcactgctcatcaagccatgctgtggcggtgtcccacatagaattagaatgacctacaactaggatatacaactatgtactggggcttggggagaaaaaaaaagaggcagattgacaacagatgttagctcagggccgatcttcctcaccaaaaagcatcccttaaaaacaaaaactgtctaggggcagaaagtggtactctctggagttatgggcaagcaggcatccccagtgaccacagctttggtggaaggcatctaggagaattccaaggtgcttggtaggatgtcagttaacagtttggatggaactaccagctttaggtacaggcatgagtacttgaataattatgacatcagttgcttttaatgtacttgctctgggcttgacaaaagactctagtgtttctaagccagagaattctttttatccagtgtaatcatcattggttagcacctattgttttgggtgagaacttcaggcctacatttcggtagaccttgtttaaggttgctatcagttgactagggaagggtaaaaacaaataaataaataaggggcctatgacttctaggccataccctgggttgtttgaaaacctaatagcagccgttttatttcaagatgaaggaactgaaccttacattaatgttaaaaaatatatatattttattatgggaatatttcatacatagataatgatgtaatgaactttcacatatccatcatccagcttcacgagttggaccaacaaccagtctttctgccttacctctgtctgtttcatcctcccattattttgaagcgtatctcaagcatgacaatttcatctgtaaatgttttcagtatggaactctgaaagacagattcccttccctaaacataatgataatgccagtgtcgcagcctttcaaatcagtagcattccaggtcgttgagtatccagtattcacatttcccctattgaaagtaaatataaaaatatacgcaaatatataaatatttgatagaatccaaacaagatccacctgttgcaattggttgatgttgcctttaagtcatttcttatttatagcttctattgccttatttttgttgaagaaactgagtatttgcagtttttcagtctgaattctgctttcctgtggtggtgtttaaacatgttctctgtatttcctataaattggcgatttggaggtttgatcatattcggggtttttctttttttaacaatactacttaatacatggtgtgttcttctgctattctactttcccccttttttggtatacctttggatacttgcaaagatttgcatgtttttgttctgacggttgcctaaatactgataggtttatataatacccttggttttgctctttctggggggctaatttctactggtttcctactgtgagtagtatttaaattagctggtacctgttctttcctcctttttctctgcctagcttggaatttgaagcaatatccttttgctcccagttactatctataaggcaatcagtgaacatattttttcagatgctcctccctcccctaatttttttaatagctgtactttatcagaatacgtagcaatcaaatactctactgtctcctttgttatcagcgtttagtcttagttctacaagtaaacatatgtttattgcttgccactagtccgtatgtcctgcctttcctgacattttggttttcggaagctcctcctctagatagacgcctcaggaagcgctcatgggaagtgtttcctgaattgtatgtttacaacagcttgtctgtggcctttatgcttaaaagtcaggttggctgttagaaaatccttggcccatctcttctttgctcgagtttctttaatattttactgtatcatcttttgccataaagtcttatcaaagtctgctgataatctgattttctttccctcatgtttaacttggcctgtttgcctagatacccaaagggatttttctaccttttttctttttatttttgaggaagatcagctctgagctaacatctgttgccaatcctcgtcattttgctgaggaagactggccctgagctaacatccgtgcccattttcctctactttatatgtgggacgccaaccacagcacagcttgccaagcggtgccatgtccacacctgggatccaaactggcaaaccccgggccgctgagaagcggaacgtgcaaacttaaccattgtgccactgggccggccccaaccttttttcttttaagtccagtagttatctagtgtcggctgctctgggttggttttgccagggatatgatggaccactttaatatgtaatttcaagtgtcctttttttttcccagcaaaattttcttgtcgtatggcttttgctgtttgtttattcttctttgttggctttaggaatgcccattatgtgtatgttagatcttctttgcccatcttttatatcaatcaccttctcttgaatctttttaatgacttagtaatttgtttgaattgagaaattttcctcctttccatcttctagttctttaaggtactattcattttatttactcttatgttctttttatttctcctttttttttttgaggaagattagccctgagctaactgctgccaatcctcctctttttgctgaggaagactggccctgagcaaacatctgtgcccatcttcctctactttatatgtgggatgcctgccacagcatggcttgcctagtggtaccatgtccttacctgggatccgaaccagtgaactctgagctgccgaagcggaacctgcacacttaactgctgtgccaccgggccggcccctccttcattgctgaaatgatttttttcttttacttctagttctttacttctatttttaaatcttcatattctctaatcaactcatttgtgagtttttaaaattctaatttatggttctctttacaccttgttttatttaatctttttagctccttttgaattattaggttatagttttcataagttttatgtctttctggcatgattttattgtctatcttaagaatgtcattctgaccttaatttttcttttgtcttttttttgtgaggaagattcaccccgagctaacgtctgtgccagtcttcctccactttgtatgtgggatgcctccacagcatggctgatgcatggaggagggctgaacctgggatccgaacccacaaacctgggcttcccgaagcagagcatgcagaacttttaaccacttggccacggggcccccctcccctgattttttctttaaataacaatttggaattcaactgcagttctttcctcttgttcactatgagttttcccgtacttttagtagggccagtatagatttctagctccacagttctagagtacccacttacgttgttttcatgaagtgataaaaatatgggctctgcttttctacatcccaagatcggacttttttttttgtcccccttcccaccccctacctgtctgaaccttctttttcctttgcccatattttctcatcttaaattcatccccagcagtttctcctcaatatggggctttgtcccagtttgttagtttatggggatcagatctcccccaccctagaacattctagcacgttagacatacgtgggtcacaaccccttctgcacttactggtgaagtcggaacctgcagaatcctctgccagtttctgtgggtgtctcagaatggccctctgagctctccagtgggtacctaacagcactttttgaagctgccggtctgttagttcgtccccacctcctgagatttagggttcatggtatactttaacacctggtttagtgcagatgttgccagtgggtttttggttctgctctctgtctttttttatgatggggcagcagtagagttggggatattcaataattatgctgccactgcagcagccaccagcatcttgccagaatctatatatacttttcaccaactgaatcaggaccaaagtagcaaattcttgaaacattaaatcactggtagctgcttttaaaaataattttcttctggggctggcctggtggtgcagcagttaagtgtgcacattccacttcggcagcccggggttcaccggttcggatcccgggtgtggacctatgcaccccttggcaagccatactgtggtaggcgtcccacatataaactagaggaagatgggcacagatattagctcagggccagtcttcctcagcaaaaaagaggaagattggcggcagattttagctcagggctaatcttcctcaaaaaataaaaaaaaggttttcttccaaagtaagttgttaaaaacgtgttgtagagagaaaagttagtggttgtaattatctgaaaactggaattgaacacttacagcctacctggcattaactttctaatcatattgtttatgacaaaatgtagtggtttaaatcatttgagtacaaggaacctcatctctgagctattgtttctgaggaaaatgtataaaaagtgacacacttttgccattctttgtttggtgtgatagtccttgagttccaaaggagataatactattttaaggtttaaaagcatttaaaccacatttacacttttagtaccatctaataaagataaaatcattacttaattgggtacatttttctctttcagcttttttttcccccagtgaaaaatttacgtatctctaattatagtcatttggaaaaaatgctgccagggcttgacataatattaatttagatttccaaaaatacgaaatttccttcctccaacttgagtttcctccaattggtttcctccattgattttaaatcacatactaaaaggttacaattttagaattggcctttttttcctccatttttaggaatggccattatcctacagccatataaggaagaagtgaaactttctcaatggacgtattggaaatgttttttttccccaattctagaaaatagagcaagatcgttttcattttgttttctgcaaagagattgaggagaaatcatttcaaatatggggctggtcattaagaattctttgcaaaaaagaagcaggcttcatgtattgttctgagtgtcacccaagaaaaattaagagaaaagtgaacacttattaagccaattgaccagcgtgtgttctgatgaatgttgcagcaaatttgaataaactaattttgtccattagtgtgcttttagaccaatgtgattgtttcggtctaattattttttattttgtttattcaaatgtagaatggctgcagaattagctattgcaacaattagctgattagcaatttagaaaattgatgagtggtatctgactactcaccaagaagtgtctgatacttggtagggctgagtggaaggacacaggcagccagagggaagcctgtgctctgttcctcagtcgctgcagatgggagctcagaggctctcgctggattagcatgggctgtggacgtgggctctgggccctcagatgtactgcaccagattgaggtctgatgtgctgcagaagttgtatttgccacccaatgtcactattctggagtcctgtagctgtgactggtgaattctgcaacatttcccacttctaaagcttggggattcgagaaatctgtgcccgagtggctgccaacgctcgtcagggggacccagtgcgaggccgatttctaggtgtaaaagccaggcagatttgctcactcaagaaaatctgtttctgcaggtttgctttgagttccaagatacagttactggtgaaaattttttgctgcactaacgccacgggtttcttctggtagctgactgtcttgcaggggaggggagtagctggttctccaagtgtggtcttggagcagcagcagcggcaacatcacctgggacttgtcagatatgcaaagtctccggccccccccagacctactcaaattggaaactctggaccagggcccagcactcagttttaacaaactctccaggtgatgctggtacaggctaatgtttgagaacctagcttgtaaaaatgactagcctttgtcacagtgttgggctgtgatagttaaaaaattaaagctcatgtggcttcttaaatgtcagaccagggtgcatttctcagttcttcttctcttgcactaaaaaggtagatgtgagtttccattggtccagacaggaaaacagacacttgcagtaccgtgggacggtgtctcgggagggcagcaaggggtcttcagaaatgtgcttgtgctggggggataggggacgggaagacccctttggatgaatatgatcgagtccctcagattaaaacctctcggagacttccagtgctcttagaataagtctgtctcaaggcctccagtgtctccttttgatctccattctgcacacagtacctgcctcaccctgtgctctcagtgttctcttcactcctcaaagatgtcctgctcctttgagctgtggcctccgcaggagccgcccctctgcccacggcccggggtaccacattctccctggtctcctcctgcacttcagaatcccagctcacatgtttcctttgcaatcctttttgaccccccagggtaggtcaggtcagctctctttgtaccgtgcacttcttcacactcatcacattgtaattaaattattgtataattattggtttattgctcacaggtggagctaaatagaaattctatgaggaggagagaacgtgccttgttcactggggcccagcacgcagcaggcattcagtaaatatttttagatgagtgaatgagtagtgggggagtggtcccctctttatccctcggatgtgtgagctagttaatatatgcatttttggtagaggggtcaccgaatgtgttttatgaagcccacgggagcagttgccaccaccatctaatcctactgctggggagacaagccgcttgcacagtggtggtgaaatccctcaatttggttctgttttggagtgtggcctgtgggacaccccagggaagatgttcttgaatattcctcttccagggatatgggaaagcagtgaactcctctgatcttggagatgttcataatccatggaccagaagccagcacctgagtggtaaaggtgtcacctgggaagttttcagggaagtgactgttgtccccccttccctcagggcttccgagaagagctgcctgctttgctcacagaagctgaggttggggcaccatgtttcttcccacccacttccaaatctgcttaataggagaacagagatgcactcctttgccttattttagccaatttgtcttggcctggataaagctaggggtttccattcctattctagaaggtgaaagggtgcgagttgcctctcagaggcgacagcttcaaagtggggacatttctctcaaataataaactaagtaagccttgctgatatttaatagaaggattggcaatagcacacctgtatgtaatttataaaaatacgtatagtgagagcgagggctgaaatttttttaaagatagacgttttaagacctagagggcaaagttgctgacatgcttaggggaatcttgcttttgatagaggaactggtaatctgttgactgtttgcaaattgactgattgttgtgtttgtctttttacatttccggctcaacatactctcctatatctagtgtaaatatctgttggattaagtgaatgtagtaaacatggtaaattttggaacaaaagtcataaacacagtttctcatttgctgtcagaatagctttaatttgctgagctggccaggagcgtggatagtgtgaatggctatagttttgtgttttctcgcctgcgtcttttatttttatcagatgccatttttcctcataacttcagttcattccacataccgcccctagcgtaatttctttcatccttggggctaagctcatttacagaatactatacagtagatccacatatacatttggctcagctaaaacattacatcacaaatgggacacaactgctccaattttaattttaaaactatttttagcttttgattttgaaatttaaacttaaaaaaattttgccccannnnnnnnnnnnnnnnnnnncagcccaccttcctgcccattctgcccccagtgtggctttaatactttctctggtactctcttatcctcctttgtttctgtcaagcatagtaattacagccagaatagtaataacaggaccgttgatggagtgcaagatatatataggatttagagatgatgtaagaatcctgatacgtttcacctccattttatagctgtcacagctgaggcttggagaggccaggtaacttccccaaagtctcagatagcttgcattggaatctatggttgtctggctccaaaacccacaccgtctttcattatattcctgctgcttcgcttgctcaccgcagctcagagaagcaccatcctctccagtctctgagcttgcttctggactttaaaatattgctgaataaagttacaaaagttgcaagattagtacaaagaactccaggatgcccttcgcctagacttaccgattgttaacgtttcgccacatttgctttgtctgtgtatatacatgttattttttctgaaccatttgagagtaagttgctcacatgcccccctgaagacccatctgagactgaggcttgtgttttctgaggacttggaggccacccagaatgagtttcttctgccctccacccaagtgtggtctttgtgccccctttcctccagggtggagccttgctccaaggagagacacttgtcttcttacctgccctcagccttagtccaaaccctttaaattcagctcagaccccaaaacatatcctctgccttcttggaaattcgctctctctagcacctaaaaaacagaacctcttctatgacaaggtaaccaaggcaaaaaaaaaaaggaataaatattgggcggcgggggaggcggggggagggagtgttccctctgtgtttctacctattctgtgaacagaggggagatgggcttcaccccagcttgttatccagagctgcagctaaactgttttgccccagctaattcaggtctgtctgcaagacacttatcaatgctgctaaccttttctctcgcaactgcctcagataaaattccttttttttttaaattaatacttttgtttttacttcctttggtgtaaaccagccctgtggctataaaatgacattttgaaagtggaaacagggaaaaacattctgttctgctctgtgtatgggatgtaggggaagatgcgatttcccttatctaacaggtccgctaaaagcaggatttagagtatatccactaataaaatgtattgatttacccattatggtgaaaattagcttgagtatctagttaagccaagtataattcccagcttttttttttttaaagattggcgcctgagctaacatctgttgccaatcttcttttttcttcttcttcttctccacaaagccccccggtacgtagttgtatattctagttgtaggtcattctggctctgctatgtaggacaccgcctcaacatggcctgatgagcagtaccatggccgcgcccaggatccgaaccagggaaaccctgggccaccgaattggaggaggtgaacttaatcactcggccacggggctggcctcaattcctagcatttttcagagctaggaaatcagagaggccttccagaaatgtagatcacatttgaaggcaggttttaaaaaatgccccaggagaacaacccaaatgtcaggatgaatggataaacaaaaatgtgtatatacatacaatggaacattattcaggcttaaaaaggaattctgacgcatgctacaatgcagatgaaccttggagacattacgctgagttacataagcaagatagaaaggggcaaatatggtatggctccacttatatgaggtctctggagtagtcaattcatagagacggaaaatagacaagtggttgccaggggctaggaggtgcagatagaatgggaagttttactgtttaatgggtacagaatttctctttgggatgatgaaaacgttctggagatggctgcccaacattgtgaatgtacttaatgccactcaaccgtataattaaaaatggtttaggggccagcccagtggtgctgcggttaagtgcgcacgttccacttctcagcagcccagggttggccggttcggatcccgggtgcggacatggcaccgcttggcacaccatgctgtggcaggcatcccacatataaagtagaggaagatgggcacggatgttagctcagggccagtcttcctcagcaaaaagaggaggattggcagcagttagctcagggctaatcttcctgaaaaaaaaaaaggtttaaatgatagattttatgttatgtgtcttttaccacgataagaaaacttttttaatgtcccagctgtcatatatttctgtttgtgtgtgtaaatgttgaccaggcagtcctttacttgtacttcatttgatgtcgttagaattagatgctatagaattagaactagagcctatgacgaaacaaatttttatttcttaaagttcgcatttgccgccagcacaacctcatttcccctcctgagcctgagtcggcattttgagggattctcagtttcctggtaggaggaaatggtatggtgactagttagcattggagtgatctgcacccacacttgtctactctctaccacatgtgtccaggacaatgttcatgccacacgtgtcctgcaagatcttgcaaggatccagctgtagccctctgtctctggagcctgcagccaggagggtcctcggtgagctgtgcacacagggctcttccttggtgcttgatagttctcggggtaaagccgccccctgactggcgtggctgaccttcgccacgctcttttgccctgttccttttgagtttgttcttcagtcattctttatgttaaggaagttgatgttaaaagaagttgagctccccccacccccacccccaaacttcgcagatggtgagggtcttattctggggattattggattcgaacccttactgcttcttatctggttcagatttcagtaaatgttttccagaactcaaaacatggaaatctacatatttacaacaggaactgaactgggctgttgggaaaaacccactggaaatgagaaagttcctcttttctgctgtaaggatggatcctaatctattgtgcttgtcagatccagaccttatctgactccccaaagatctgctttgtaatggcagagaaaggtttcctctccacacatatctttgtctgagatcaaaaggggaagtcctgcttcctcaaacattgggttgtatttttcttaggatgagtgcgtaggaaatatattgagtcgccctatgaaagcctttgctgctagtgatgtatacatatctacagggaattttgcaaaatagtaagctgagaagggcccttctttcagtgttgaatgatgtctgcatctccacacttactgttcactttataagatgtaagagccagggatcaaattccatgtttaggcccttattctaattctgtgttcaaacactggtttagaaacaaagtaggtgatcagttatttatatcataagagaaccactgctattcattcttgccacaaatagtaccttttatgtccaacccctggatctttataaggggatttctttatcttgacccttttatggcctaagtatttgattaccgatcctagaatcgtagagcttttgatggcctctttacagtttttcaggagaggaagctgaggcctagagaacctgagtgagttgcccaagatttagaatcaagaactgctacatgtccccactcttgcgttttgtcttcacatcctcactacctgcttaagagcaaaaatatgcagttagagattttatctaaaacatacaaatattaaatatcttagcagacaccaagctctagttttgctcatctcctccaacctgagaaaagctttgacagatgtcatatctttaaatggcatttattggaagcttgactcattgctgctgggcctcttagtaagtttccttagacgcatgcagaacatttcacatctccttgatcttgggtgtgctttcctaaaagccaaagcagcccgagggcatcttctcttgccaccagatggcatgcttgtgaattgggaactgatggaaggaaggagtgtggagggttcaactacagtgaggctcccagttgggcacagtggagggatttgagtggggaaatgctttatagtagagaacaaggtctgtgtgatttgcccagggatcacaataacagcagaaaagcagaaaatgcaaatgctacaggaaaggtgtcatcaacacaggagatttattagcgctgggtttgtccatgtggttaaggcagaagataaggggggttgacttggcccccaggaggaaaccactctcagtagcagaggcaggaagggcctcaactgcaggtgaatccacccaggctgaaggcccacaggaaggtgggcgggtagaagatggcatggcctgagaagggcaccaccccggtttgtgctgggacatccctttctagcaccagggagcctggctagacactcttcctcaggatgtccatgggaatgtgggacccacatgaggtaccactggctgctttgtgtctcatgtattttcctgaaaagcgtaggtgtaaagaaagagggtcttaaataaggtgtttttcccctgcctttagtaccttcgaaccccaaatgggcttgtgtactttctggccatgttcatcagcccctgaggtcaggcagcagcagcccatgagcctctggcaggtctgcttagcagccttctctgctagtcactcctctgtgttcctgcctcccattccttccctcttcgttgttctccctggctccctgcctctgtggatgcgcatccatccaactcttcctttgagccctctgggagcacccacgtcttccattccatcattagccactgtgtcctgtgttcactgactctgagtcctccctcgtcctctttcatctctcctctccccaagctgtcctgagattgctgtcccccaacagaacgtgcactcaaggctcttctcccatatccatgactgcaacactgttggagattctggtgtgactggcatgggatggggctgagatgttggtgattctagtgtgcagccagggttaggaatgagtgatgttagttacgtgactgtccctcctcactgctgtcagtgaccactcctgtatactgaagactttgggactggttcttggtcagttgtcaatttctgctcccccacctgctgccatgttctcagagatcctgacatccaactagaaggccctctgcaccatctagcctggaatttcctggctctcctttaccaatcgagtcattgccatctctaccctactggagccaccttgggtcttgtcatttccttctctgccttcttttctttgtactctccactccctccctggatgatttcatggatacccctagttaccgtccgctaaccaccctctgtgttctggtaagtatgtctgtgggcctgaccttccccacccttgccaatatccaggaccttccagctgccacctgctagtccagatgcctataaatctgtttttcctcttccaatctcttgacaccccatctccacatgacctaagccaaaaacagagatatcttctctccttcctctcgcttcctcactgcccatcccaaggcctcttactcaccgagtaaacacccgtctatcctctctggccccaccacctctggcttatgctctcattagccattgtctggatctagctgtctcgcagctgtccttgtctctagtcttaatctgtctgtactaacattcgctgctcccagaggcatccccccaaaacacacatgaatagctccccatcagggcaggcttacccccttactatgacaaaggagaccctacggtcgtcctgtcctcagtccctctggcctcgcctcaatgctgcagtgattctgaatgatattgtgactcctacacatgcgccctgctagttctgtgatatttgctcttggggtacccccatccagtagacctttctccttttctaccccacagcttggccaggtcatgcgtagtgtccaattggagctctagaaatctttttctgatctctcttcttgcccactcccattctctccctttttgcctgagcttgcttcattggacagtaattaagccatgtgagtctatcttccccactggactgtgagcccctgctctgtattcctggtccccagccccacccaggccaaatggtaggagctcaattaccacttcttcaatgaagacaggtttcagaagtgcttgctttgttcctgatccatccctctttgccactgatgactaacgctccatcttctatttcttgtccttcgatgattcccttctgtctgtcagttcataatctttagaccaacattgaaatatacttaaggagctgcttttaaaaaactgtgctacagtgaagtctttgttatttttgtgaattttaagccgactttcaaatggctgatcattttataatggtatgtggctattgcttgaaactatcaattgtgtcaaatattgaaacagattttgtatactctctaagtatcctgtaccaaatgtagtaccaagacctggcatacagatggaaaatttctttcattttttaaaagctaaatataaatttgcatgataccaaggagttcttttttcaggccctggacataggcgtattgcagtgaaagacttaaaaaagatgggagatgttgtcaattacttgttatttacctcatgtctaaacctgagtaggttttaacaatgagttctatccagagtggtattttaatctctatattacaaggttaaagatatatctgaactttctcttacccagaaaatcctttggaaatagtagaattgtgaatctgagttcatgtgatccatttaggactgttcttaaaattgtctatggaggtgcttttaaaggttggagggattgggtggcgtgtatgggaggatgtagttgtaaggtagttcagtttctttgaaagctcatgctttttcccttgaaaaatgcatttgattttacttcctgttttaccatatgtaatataatataaaaggatgtttaaaattatttgtcactgagcgaaatcgaccttcaagaagacttgttaacaaacaccctagatcagagaaggactgttttgtaaggatgatgtccccgacgatctccctttgagtcctgggatgtgttcgtcacctttcagtgttgttatttcatttgtattggatttgtctcctacacaaggctgagcgccccgtcagcatctagttcacaaccagaggaataattatgctatagatgtgtgttgaaacaaaagacttttcaatgattatggtggtgtggctgcatcacagcttaatgcgggctgttctgggatcctccatggcatggcttccttcattttgggtgggtgatccagagtggatttacagccttcctgccactgggcaagagcattttttaggatttgtgtggttttcactgagctcatcttccccctccccccggctttatgctatttccagtatcatctacttgtttttaaagcctcctgggtgttgtgggcaattactaggatccttccatcttggtttttatccagtttattcctatgggaatataaaagtatgtcagaaagagtaggatgtacaaagcattagcttttgtattacgagttgtggttaaacagtacgtgaacgaatgagtagttgaactacagtggaactttgccttcgtcgtggcgcttcctgctctatttccccaaaactagaaaaggcctctctacgtgggttttcttccttgccattattttgcttggttccttatattggtgtccaaaaggagaagacgttttgaagtgacttccttactttttaaccccagctataaatccagtctttgcagctatagacatgtgtgaagggtgtaaagcttaggaggatcgtggagaccctagactgcagtaaccattgacatggtccaaccgctagtgaaggtgattggggagcagttacacaggtcattgagaaccttctacaggagaagcccagtctggactctttaattgctcttttcattgatagatcacaaaaaatacaagtatacctttaatattttattttcacttaagaaaagaaagatggacagctgagctctttttgatgtaggagcaaaaccttttctttgagttttggttgattggagtttgggttgactgatgggagttctcaggggagttctgagctgccgtcctcaccatgcaccacacccgaagtgcaaggtctgccatttctaatttcagtttccgtaaatgtagtggttgggaaacagtcggaatgcagaatccccccgtgattgtgaattgggggccctcccctcatcttctgatgtttcacccgcattcatgcagcagtagtctttttttaggggagccacccttatgaagtgtttcttcattatcagagaatcaacacttctcccccaacacacacaggctcatctcatcaattttcataacgtgtacttcactaatatgtaatacagtatcaagtccaattttccataaacaggtttgagaataaaaccaaatgactcagatggtgtgagtagaaaagcaaagatggacgagagaaggacctaatagccttggtgttcaaagtctctgggcgcagtgtggtttaaaactttgaggttattcagcctgacgggttgaaagagcttctcctaggaatgcctactttgtgtaaggtagtagagagatgggaacgaagatgccgttcacgtcctcaagtacaactgtggggaacaaataaaaataatgacaacgattaatttttttaaattatgtgatttaaaacaaagataaggggctcacagaggctaagactggaggtcaaaggggtcagataagcaagagccaaagtagctgagaaagtttgaagcttcacctgggccttgaagaatgttttttgttgtggtaaaatatatgtaatatgaaatatatcattttaagtatccaattcagtgctgttaggtatattcacaatgttttgcaactaacaccactatcaacttccagaacttctaaaaatcatcccaaacagaaactctgtacccattaaacagtaactctccttactgccctccccctagcctttggtaatatctattctatgttctgtctctgtgaagttgcctgttgtaggtacctcatatgagtggaatcatagaatatttgtccttttgtgtttggctcatttcacttaacataatattttcaaagttcactcatgttgtagcatgtgtcagaatttcattcctttttatggctgaataatattctgttgtgtgtatataccatgttttgttaatccgttcctctttcaatgggcacttgagttgtttccacctgttggctattgtgaataatgctgctatgaacatggaaatacaagtatctgtttgcgttcctgctttcaattcttctgggtatggttgaattttatactattgaaaggttatagagagggtatgttggcatttatcttgatctattgttagaatcttgcattgttaactgttcataagtgcccctttcctcccttatttatgctatcggagagcaaggactgtcttcgagtttcagcacttagcaagacacctgggataaatatttgctgaatagttcctggagttcctagcccagagccattatctctatagtagttggtccccagaacggtgagttttgccaactatcatgttttgtttttttttggctcattaattaacatgtgttcagggaacagaaaacaactcttagtattagccttagccaaaaatgattagggaagtacattttctaatgcaaacagtcctgatatagataaaacccaattcagtgaacatttgttgagaatttgctgtgtaccagacacatttcaaaatgtctaatttcaaagctggaataccttattggtattgaattttaaatataataaaggtatgtgtgtctatatattttagcatgaatctctagtcttttttattgtgaaaatattataacaacgttcaaaatagtttgaaaaaaaaagagaataaataatacagtcccactctaatataagctctattttcattttatagtgtaaatttgagggttgaacctataaataatttattttgaaagtaaaaccctcaatgcttctcgtggtaattatttttttttaaatttatattttaaaactctaggagtaaagcgtaaactaatgatctcaaatttggagggcccatttttggaggtatccgtaatagttttaatggatgaattaggccactcctttttcttagtggagctgcagagttgtcttgtcttttggggataggtgagtggactgttacaggggctgggtgtttagcagccggtttttcctttcatcttttatacgttcaggggttcaagggtgtgttttatgactatgctaagggaaaaagtacatgtgtgacccttacttcgagggcttggagaccttggagttggcagaggagggaagatctagacggagatcactagtgagcatcagtccaggccaaaggggagatggcactggacatgttgggaggatttagtcagggcaggtgatcagttagggaacagcatccttgagggcgaggcttttcacatgacaaggaggtgaatgggtggagttggtgtgtcctggggacacaggcagaaagataggcatagcgaggaatgaagaatgtttgcaggatccttagccagccagcctaagggtctgtcttattagagaggcaggctgggtccagaggaaacagctagaaattaatctcatgaaagagctttgtaagctgtacatgatgtcagcgtttgctgctgctgcctctgtcggggtttttgaagctgggagtggagttgttgaaaaggtggtgttctaggctgatggaaccaagttgtgaggtgtgctgagtggtgggtggggtgagtgagtggaggctggaggtgtgggtatgttttaggagaggatgttgtcactctgtgagaggtggggcagcaggagtggaaaggcacacaaggatgtgcggcagaggctctgaaggaaagattgctgggatgtgctgccagtgagggagaagtcaggcaggaacccgtttgggaaatgatggaaccattcccatccataggaagtgagtaagtcgggactgattagaggggtgataagaggttctgtttttagaataactgtgtctaatatttattttgtgttttctgtgtgcccaagaacaattctctcttctttttgaggaagattagccctgaggtaactgctgccaatccttctctttttgctgaggaagactggcccttagctaacatccgtgcccatcttcctctactttctatgtgggatgcctgtcacagcatgggttgccaagtggtgccatggccgcacccgggatctgaaccagcgaaccccaggccgctgaagcagaacgtttgcacttcaccactgagccaccgggccggtccctcacgcacaattctgaatgcttttacataacagcctttgaaattggtgctgttactgtccctactttacagatgacgaaactgaggcagagttgattagtaacttgtctaaggattacatgctcagtgagtggcagaacctggatgcaaatctaggcaggcttaacacaagagccaagctcttacccaggatgctttcctcctttacagtaagagctagcttttattaaaaactgcccagttctgtgttaatttccttgcatgtattgaccacatttgaatcccataagaactctatgagatgagggcatttttatcatcatttcccacatgtggaaacttggacacagagaagttgaatgacttgccttaggtcacacagctaggccttgcctacactggcatggtaggtctctggaagtcagcaatatttattcagctggattgtagtatctacatatgcctttaagatccactcatgagaaaactgaattgattgaaatatattgcaatataaattctttaagcatttttggattgaatttactatcaatgtcactcatagtcacttggaactactgtttttaaaagggataaatgattgaagtaatagtgcctccatttattgcggtgcccatattcattatttaatgctctatggctttgaaaataatcccagccccttcgtttccataccctttctgctccatttaggtgctgagcctagtggccacagataatgctgctcaagagcacctctcgtgttgttgctgcttgataacatttgatgattataattgaccttgtcgtcatcttctgccaatcaaggctgccgggtgtcttctgatctgagggtgtactttgcgtgacatcgtggagctatgatcgatgccgtggttgaaaggcgcccgcgtgaaatatttgtctggaataacaagctgcagattgcgatgggtcatcattacatacttgcaggggactatttcaactcttctttagagcacctttgatctgtccctctccacagactctcttccttctgtcttcaaatgtcaacaggtctcctcttttctttaactttcaccttgtttgactacagatctgtttttctgccttctcctgccatagctctccaacgagaggtctacacgggcatcctttaaccttggaacaaacagaaatttccactcaactgaaattgtactcttggatttcctgtggtctctgtctaaccaaatttggggacttttgctcattcccttagagcttgctcagtctctgccctaagacctacccaccttcttttgaaaccttcaaatgtgttgccttccttccctcttaggcttctcccctttctttctggtgtttttgtttttaaaatctcccttgactctttcctacaccctcttggccggaagagcccttcaagattggtcctcagtgtgttcctccttttttccacaagcgctttcccttgattatctgaacccatcttttaacttcacccattatcactctgcctctgccatctaaatttcagggcatcaagtgagaagtccgtctaccacccagagagcatctgggaacaggtctcttgcttctcctgtcccggcccctttctgaccatgtctccatctccgcaccccagccatcctgaacttatggagagtttcttagtatggcttgttcttgctgcctttgcctcccatctggcttagatggctttcactcttctttcagaactcaggtctgttcttctctccaaccttgtatgtgtgtggagagggcacagatctgatgatgcacatgagccattttccccgcggtcttgcactagtgattgaaagccccccagggagatctgttatcctgtcgctccagcccacctccctcacccgggtcatccatgagtcaaccttctgtttttttcattgtactaacctataaccattaatgtgttcttcctctgacagtatacagatcttcctctttagtatcaaatctttactataggtttttatcgcttctacctgcccaaggaccagagtttttcactgatctccttgaatctagttggcctctggtatctcactgtgtttgtctttttgctcctgacaagcctatggtgtctctacatggtctacatgctatatatctatggtacatgtctgtcttctcttttgcctcttctgatattgtgaaggtgcagcccacctcttactttttcttcagtttaaaatactaaatcttgtagctgtgtttcccatattctgatacttgagcagtgtgttctctaactctggagtgtgtgtaaggaccacatgtcacatttgcatggacttttccccagaacctagcacaatgcttttgcagatcataattaatgaacagatgtttgcatatatggcaatagatgcatgtatcaatgaatgggctgttgtgaattttctaaggttcaagcttgatattcagagtctaaagtttgcatctttaaactagtttcttttccaggaagcctatgtaggctttaggttggtcagactgcagcccaacatataccatgaaagatttcagggtctgatcattaaaagttggcttttaattttctgccttattgtttgaaactcataaatagttctcctttggatggacgtcaccatataaggagaattgcctagaaataactgaattcacaaagctttaagaaaagccaagctatgtcatggtcatgtacattttgccaaaagagggacaggccaataattttttttgtagtgtgagattttgtttttgttttttctaagctgggtgtcagcatgtcagtatcactgcaatggcccatgttcagaatggaaggttgacccaactgtatgtttaacccagagaaggccatggcatccggcaagtctttgcttgcataccaagtgtgaccctcaggattaatggagggttgcagaaaataattttctggatgaacttaagaaactgtaaacagagctctttctaaccataaatagggcagctttgtcctatttttattgtagagtacacagaagatggaaatcaatattggaagaaatgttttatttcgccaaggaaaaagatcatactcaacacgattctcatttttcttggcaggctcttctcaaccatctgtgagtccaggggaactgtctccaccatccatccatccagcaaaatcagagttaatcgtcagtgttggcgacgagattaggctgttatgcgctgatccaggctttgtcaaatggacttttgagacctggggtcagttgagtgagaacacacacaaagaatgggtcacggagaaagcagaggccacaaacacgggcagttacacatgcaccaatgaaggcggcctaagcagttccatttatgtgtttgttagaggtaaatgttcggctttctttgatgttatgctttagagaacttaatatcctgttcttaatcatggatgatatgtagagggctgacctatagataaaatatcactggctgggtctagaaagcctaaaacaagtttttctttgctagtttcccccatcttttgctgcacaggggctttgggtgccactccagctgcaggtctgcaaggctctgatactcttctttaatgagattacaatacggcgagcccctttgtcccggtgctctgagtaaaccctgagaataaattaggccctttgggaaagctgcattttaatgccttgagatcccagatactcccacttagtaaaaacacttcagggaactaaaggcctctaaaggcctaaacagaccaacacttcaaaagaactgacccacttttagggagtaaattccagaaaaataacgcagtcagctaagcactgcctttccttcctgggttcttaatagacgtcagtggattcatttaaaaaattgtgacctcttagaaacaaagggaaaatatgacagttgtgtttctagacttcatttcctatgatgaattcagtgattcatctgcatttgggcttttaatatccttgtcaagaggaggtttgctgggaagttgggtggggggtagtatctttttgttgatgtaaaaactgaagtacttaaagcttcagagacatacccaggttataggaggagaaatagaggcccacttctactcctcagtttgtgcctggactggagctgtcactgaaataggtgggcctgaggaggaggcctcatccatggtactgtggaagaataatgaatacatttatcccaaattgtagctctgagcaactgtgacatttggataagattaccaactctgtcttccttacctaattattgttagggagacagaattctccaaattctaggaggagaataattcaagggttaataaagttgactcacgtgttcactatgaagaaggttgccatgaagttgattctgcctctccttagcttatctggtgtcctttccttggtgggtagctgaaaataaatatacatagataagccccagcttagcctctggatatggttctataattgttgagccaccctgtgtgctgttctgtgacattcaagaatgtactcagtaagttccacttggtaatgaagtatcattctgcttattaataggatgggtggacaactgaatcaatggggaacgctgagttagccaaatcagtctcacagagctcacgaattttctttataggggacgtcatcctcagtaacttagagctatacttaattattactgatttaagatgtttgggtacttatgtaatctgtgttacagcaatgaagggaaatgcggtattgttgtaggagctagactcgagcaactgagaacgagtagatggaaaaataacccactatggcctcagaccatagttcagccagcgtgaggtgatttattcacagaataaattagtgaggctgggaggtacataattccttttgggaagctctttttcaaaattgggcaaaattaaatgataagtgtatttcaattatgtcaaattgatttttgtggaacacctgatttccggttggaaaggacaattagaaaacatttaaatgtaatctgttggcccaatcgtgtacctgtgttatctttacacagtagagatggcagcacattgactatacggaatggggtttgtcttggcttatatgaggcctccgtctgcctgagactccacacctggtatcctgcataattattaatagtactccgtctcactcacaagtgtcctggtttgggcaataaagtatttgctacggcatttctgagatccataagctccccttgtgcatatgaatttatctgatttccagaagctacatttatacatagctttcaagcaatatgaatagagtgaggcccacgtgttatttgtactgggtggcctgctgatagttttctagattcgattcagaagcttaaagatcctggagactgggagctcgggaaaaggacccacacagaggggttagaggatttcttgactctgctaggtatcttagactggctgcttctggcccatgctccttgaggtattccctgttgtagaagagagtaatggtggtaataagatattctcagagttttaagagctcgcattgtgatatcagtcagacctgggggttagagttctgcccagccatatctgggccatggcacttcaggagagtcacttttttaagacttcagtttcttcatctataaaatgggtataatgatagtgtccatcacatacaggtgtgttaaggattaaatgagatagataaagtgtgtaatggtccaagctgagtgcatggaaaaagtttaatgttaactcttactcgttagtgttatttgggtaatttctacttttgcttgcaaagaaaagagtcagcagccatttgagtcactagggcttgttgttacgaaaggcaacattttagatcttttaaaaatgttttcagtgcctgtgatcaaccattcaaactgctgatttttgatagatcctgcaaagcttttcctctttgatccttccttgtatgggaaagaaggcagtgatacgctggtccgctgtcctctgacagacccagaggtgaccaattactccctcatggcgtgcgaggggaaatctcttcccaaggacttgacgttcgtcgctgatcccaaggccggcatcacgatcagaaacgtgaagcgcgagtatcatcgactgtgcttgcgctgctctgcagacaaggatggcaagtcagtgctgtcgaataagttcaccctgaaagtgagggcaggtatgagcccgttcctccttgattctgggagtgggagcatctgttgatctaaagaagacttctctcttcccattggtccatctaagtatagtcaatcaggcagctggctgttcatcaattcccccagcgtcacaataatgtcagctgcatgtgaattctttatttcacagtcccagccccacatggccattccgtgactgcctccagctaggtgtgtctaccacagattggcatttagaccgtactggggacagtcgttaacctcctgacttcaggtcaccccaggtttcataattgcactaagtgttccttgcaagagaagctttctgggcagctttagttacactgtttgaaaagactagcgtacagatcattctttccttgatttactgttgaaatatgaattgactttctcctcagctgtttaattttaatgcattctcaaaactgttcacaatctgaggaggaaagcaccaactgactatggaccttgttgttatggtggcattatgtagaatatttcggtagctagatgatatccagatttgtatctcagagatcatctaattcaacaccagttggcatgcagctattgagtagtttttattaaggcatttgaaaaagaatgctcgttgggattaaggaaagtttatttaaaacctgggattttcagaaacaagcaagatactatttttacaatacgtgggaaagatgcttatttgattaaaagaatagaattagttttaggtcacatcctcgtgaaacgatgaaggttatgcgaggcaaagattaaatcggtttccgtacgccagggcttctccctgtactgaaaaagcattgtccaggagcattagaacctcacaatagacaatctgatctttttcactcaatgttaatgaatttccatgaaggatgcgtgatttaattgctgatatcttcagatatgcacataatagagatcagttagtaccatactttatgttttatttaaaaggcggcaaagtaagctgtgcacatttgaggaaaaatcataagttaaaatgtcatgctataatagaataaattctttgagggccacatttcttttcttttctagccatcagagctgtgccagttgtgtctgtctccaaagcaagctatcttcttagggagggggaagaattttcagtgacgtgcttgataaaagatgtgtctagttccgtggactcaatgtggataagggaaaacagccgggtgagtgaatagtttccttcatttttctcaatatatcactctctttatgtgggagattttaaggtttttctttaaaagagtctattaattatctcggggatggctcagctggtgtgtctgtgaggtggaactggctgggaatgtgttgagatgtgtattttccactttcatgacgccatatgtagttgtgtacattcgctattagtaacaaataagtgtcattttgtaaatttattgtgagaaaatcaaagagaacttcagacttattacttcatgctgtttctttgaatgactttagtagggaaatttttaaaaaaattaatggttaactgcataaatacgttgattttaaaacttcttatcgaaactattcaggccagattacttaaaacatggggaagagttgccagtttttttccttccatgtttaaaaaggataaatgggtctcagagatttacctggaagctctttcctctcccacgaagtggcctatccatttgagagacagatttctttttgtctgggtctaatttcctcctttgaggctggttacctgagatcaagttgctaatggttttctatttgttttagtccctattaataaaatggttgtctttagtccgaaacatttagacatgtttaggttctcatttgtttaacaaacgcacgttgaatgtctgctatgtcagagaccatgttgaggtgtatcttaaaattaaactttagccagttatatttgaaggttgtttttttctctctctctgcatagtcatattaatagcaaagtctttaaaatgcctaatattttgctttaaaattcccattgactgaattttcaataatttttgtttgaataatcttggtcatctaggtaattagctctcatggtggtttttttcagtgcatacactggaaaaacaaagcgtgctattttcttcccctccacttcctcttcttcctcctcatgctctatattcaacattggcaatttcatgcctgtttaaagaattttttgctaaacaagtaaccatagtgattagcataatgcaaagcatgatagtcctcctgtagacctgtgatggatggtagcttgctaaagaaagtctcccattgactagaagaatggattgtatcgtaagatttgttctttcaaaccagtgactcagagaaacaagtttgagtgttcataacatataatttaataaaaataatagcttatgtatggatttttgactaatcttacagaacacaatcccatattaattggctttctgtatccttgatttcagatgagagaacaatttagactgtgtgtgtatctgagcctctgtataacttggaaattagcctttttgagacgagaaattaaattgccccaggcagttttgttctgaaccgtttttcccaggagccctgcatgccattcccaattaatccactggcgctggtagataagctttcagtgttgggagctctttggggaaatcccagtgtgcacctccaagggttaaggaaaaccaaatcacgtgcaaacaatatgcaatgtgtgacttgcagatggggctcatggctctatgccaaggttcatccatgaatcttttattggtatcttttggcttaatttggaatatttagcactgttagcactgtcaaattattttaaaaatccatagtatgtgattttgaccatttaggaataagtttaactcacaatgaagttttgggtaaaatgactgttttagcattttttgcaattgtttattttaaaacgtgagtcttggcgtttattcaacacttttgagtcttggttaccttttgaatgcttctaaacccttgtacttttactcacttttaattatgatctttgacagtatcctaaattatgatcttcaagtttgggtgtcaatattgcgtcacttttatgaccaagctcttccttccagcactggcatgttcattgtttctgtgtagctccctattgtagactcctaggctcttgcaagaactagaaagaagatactgtgattctagaatatggtatattaactgtccattgtcattctacctttgtagaggggaagcctgtgacatgatggactgggagaggccagggaaaatgtcacttcaacttgttattacatcttcttaaccattgatcttatgcagtgaaatgacagatttctgccaattgctagaagactctcttaggaaggagtatcttcaaatccatatagtgctccagactagaagggcctttaaaggccattgtgttcttgtccccttttagaaacaaaagctgagactagtggtatcctcgacttgcccaaggtctcacacttagttaacaaagcaggtttctcttctttttatttcaaaacattcaactttggcattggcttttatgtgtgctgattttaaagtaaaaaaattccaaaaatataatcacatgagaaaaaaagatagaatcccaccattgtatatagcagtgctgtgcaatagaaatacaatgtgagcctcctatgtaatttaaaatgttctactggcacgtgacagagtaaaaaaggtgaaattgattttaatatttttaatgcagtatataaagatattattttgtcataattaacataattattaatgggatattttacataattttttttatattaagacttcaaaatctgggacatattttatattcacagttcagtttggactaccacgtttcaagtgctcaatagtcacatgtggttagtctttataagtgctatattgcctgcatctttttttcatattctctctctgcgcatgtattatcacattgttgcagttttaaggtaccctcaattaatgctttttaattaatataaacatttttcttattttctcatactcataattttgatacctagtgcacatttaggtgatctctgaggtttcactgcagtaaataacttggaggttttttttctcttgcgcattttttttttttattgaggtaacatgcgtttgtaacattatataaatttcaggggtacatcattatatttcagtttctgtatagactacatgttcaccatccaaagactaagtctagttatcatccatcactgtacacctgtgccttattactccttttgccctcctcccttcccccttcctctctggtaaccaccaatccaatctctgtatctatgtgtttgttgctgtttgtcttccatatatgagtgaaatcatatggtatttgactttctctgtctggcttatttcgcttagcataaaaccttgagagtccatccatgttgttgcaaatagcaagattttatcttttttatggctgaatagtattcccattgtttacgtccaccacatctttatccattcatccattgatgggcacttaggttgtttctaagtcttggctattgtgaataatgctgtaatgaacataggggtgcaaatatcttttagcgttagtatttttgtgttctttggataaatacccagatgtggaatagctggatcatatgatagttctattcttaattttttgaggaatctccatacatgggcaggagcttttgtgttttactgagttaagttccttgagttaaatttgctggagttgatcaggtatatgaacataccgccaagttgctttcccgaggacagttctgatttataatgctgtcagaatggtctaatgtcagtaggttcaccatagcctggccaacaaatcacccttgatctcattctgtgtccatgtcagctcctgtttactttcttttttcagttttgttttgttttttcccattgtaataggaatgtattcacaatacaaaaagtttggaaggtgtagaaagctatatgctactccctttaatctgttcagagtggctgtagtttatgttatgtttttttcccatgatgttttccatacaagaaatctctccatgtcttgtctggagacaaataataagagtgggatgatgatatcataagagtaaattagcaaccttttttcttcagctcatgcttaaataatttggggctgggtcttatatactttggaactccccttaatatttgccagaattctgctgggtgagaacagtgggatgagtttccaagttagttttagacattgtgattccattttttttcatgaaagtaatataaatgttagtaaaatagaatctattattattattagcaatgtgttttctttcagtcactaggatatagaatagaaaaatatataatgggaaatattgatatcatataactatgcatattctgtaatatttcttatagtaacttttaaaacttgacacaaaaaatatttagcactgcagagaatttggaattatgtatgctgtggttattaagaaatgaattttcatgtttttttctaatcattaataatgactatctttcaatataatcatgtaatatgaagtgttccaatgacagacttgtcatgatgctttattattcttacttaagtagtgtataatgaatgctaatatggagaagttaattgctgctatttttaatttatctaggaaggatcctgaatataaattttatggtaatctttgattttttttttctccccttctgaaaccagcagactaaagaacaggtaaagagtagtagctcacatcagggtgacttcaattttgtacgtcaggaaagactgactatcagcccagcaagagttaacgattctggagtgttcatgtgttacgccaataatacttttggatcagcaaatgtcacaacaaccttggaagtagtaggtaaatatctctgggaatgtatgaattactggcagtagtgaaagaagaaattactagatagtttccttttcatgttaatggaatgttgaacagatttttagaaattttagtatcactgaatgaatgaatgaatgaaatgaatgaatgaaaacatcgtcaccccctccaactagagcacaaaggaaattctaccggtttaatagagggaagtggaaagctgtaactgacgttgtttacgcagcctcccctccccaccaaacaaacaaaatttaagttgagctttttcaaaaattccagtccttgctgaatgacttgcatttggaaatggtgtagcctttgtctttggaggagagcaaaggcttagagcctaagatatttctctgaatctttgggtgaggcccctcggccttttggtttagagttttacccctcatgggctctcattcatttgtagcaagaaaggctgaatttgagcctctcctccctagcacgcacctcaccatgccctgttctccaaccttaggccatagcatagaccttcaggcaggaggccactggggaatgggtcatgggtcctacagagtgtaaactggaacatggtagcctgtgtccctaaccccatcatatctggtgtacacaattgctttagccttttcttccccactctagaaatctctctaaatattttccaatcatctacttaatgagagcaaagtctagggaagtacttgatgtttttgatttactgaaaaaaatactaatttttaaattacttcatttgcacatttcttgtcttttgagtattgtttgaatttaatctgttttcttgtctttttaatgcaaccatattcattctttttgcttggctttgactaagtcttgaggctggtgaaattcttcagcacgagcaataataaaatgatgtgatatttgttttcctctctctcctttcccccatatttcttcaataatttatgtagcaatgttagagatctgtgatttatcccaccataatctcatataattttggcgtttctgcccatgttttaatggaaagtagctcagcagaccgaatgtggagaagacattttacttgcaattatagagtcagcacacagaaagagtgctactttgtccctgaacgtgattatgaaccatttattaatttgaatagaaagctatgcttttaaaatattaaactccataagtgctaatttgctaagttgattagggagtgtgttgatatatcagcttcagctccagaaagcaattagaaggatgttttcagcatattgttgtgtgtaatcagatttttaaaatccattcatcaatttccaagaatataactatataactggaaagacttgtggccgtgaaacctgaatctggttttgtgttgtttcaggagtgggttgggatgggagaggaacaggaagagacaaagagaaaagtaatttctttaggggttgagagagggatttggatgcaaggtggagtggtggagagcacaaggctttggcttggccctgatctggttttcagttgggctctgtcacttaactttcgaatgcaccctactttaactctgcctgcatgttctcctctgagaaacacagcctctaactcccgaggctgtgaaaggagaaaaggcaacagattttattaaagtgcctggcatagtgtttgcactggattaaatgaggaacttcagactagtgttttgtatatgactgtaagagaaatagtatcagtgcgaatgttgttgtttgtaatatttgaatactttgcattgtgtgctttctttggatttaagaccttgagaacctgaaaatttaatgcagcattcagatgaaatatttattccctcaaaattaacctaaattagcttaaaaatggtggaaggtatgatttatgactcaggtattagaacagagtggtggtttctatctgcagttttctatctgcagttttcctttggatgattttttgttctcacctgaaaaaccctttttccgttggtacaaaggatagttggaattaatttgtaatcggaatctataaggaaacgaaagggcagtagatacgataatgacaactcctgtgggacatcagtgtatttaaccaaataatgccaaagatagtgaatgatcattttacattctacaattagtttttaaattttgaaaaataaataaaataaaataaaaactcttccctaatctcactaactggaatgtaaccattttaaagatattgtttatctttttgtatgcagcagcactttaattacacagacagtattattctccctctctctctaactgaaagtatacagtgactctaggatgtgctatcttaagaagaggccagccttggcttcctgcagacctgtattcaaatccgggctctgccattgggtagctagccatgtggttttccagaacttgggttttttaggagttattaaattgggagttataagttttctctttcagtattgttacaagattaaatatttgtcataattattaaatgaaatgtatgctaaagtacttaggacagttcttggcacatagtaagcatttcataaatggtggctataaaaataatattgacaattgttttactacattcttttccaacctcttatattattattatataaccatgtctaagggctgctttattaattaaccagttttctgttttcttgttttaaaaattattataactagtgtaaatagcacctctttttgcatgtagccatccactaagaagagttctcaaatggaaattacagggttaaattgaagaacagataattttaaaaagtctatattgctaaatgcttgctttttttttcttgtttttttgctgaggaagattggccctgagctaacatccatgcccatcttcctccactttatatttgagatgcctgccacagcatggtgtgccaagccgtgcataggtctgcacctgggatccgaactggcgaccccccggccaccaaagtggaacgtgcaaacttaactgctgcaccaccgggccagccccaatcttcctctgttttgcttaaagaagatttgccctccactaacatctgtaccagtcttcctctattttatatgtgggccactgccgcagcatggctgacagtggtgtaggtctgcacccaggatccaaacccgtcaacctggaccactgaagcggagcacataaacttaaccactgtgccccagggccagccctgctaaatgctttctaaaagagctgtgccactttctaatgtgtcacactcagtgtgctacttttaccacacttgcaaaactattgcatttatttcaaatcggtattgtttttccataggatggatatactttattttttaacagctttattgaagttttgctatttttaataagtgaaatgtgatgccttattttagttactagtttaaatatttttttcttctatagtttcatgtcctctttttcctattaccttggttaattttactatatagacatttttaaatgtttatatattctgatttgtcttttataacttttttcttctgttgcttctaaacagcccagaaaactgccccctctgtagaagtttgataggagtcaattctgttgtttacttaaaaatacagtttgaggggccggcccagcggcgccgtggttaagttcgcacgttctgcttcggcagcccgagattcaccggttcggatcccgggtgcagacatggtgccgcttggcaagccatgctgtggcaggcgttccatatataaaaagtggaggaagaggggcacagatgctagctcagggccaggcttcctcagcaaaaagaggaggattggcagcagttagctcagggctaatcttcctcaaaaaaaaaaaacaaacccagtttgattgttaaaatgctatctttgatccatctgtgacagatgatgtgatgagaagatgtaagtttatttttcttccaatactaaatgacagtttttcaactttttaattgaacattagaggtctctttctcttcttgatttatgacagcttcttatcacacatacaattatcctgggtctgggtataggctaactctttagttcgaatactttttaacctaataaacatcaaggctagcagttctagaagacttacaagatgatgatagatctttaagagagctgcttatgagactgaggtgggagaataaacattccaactgtgtgtcctttctcactttgtgacagtgattctgcaagagcaaaataaagtgtgaaacggcgagttaacgttcttttacttgctacggtcaattaatactggaaacctgtcaattatctttgcaatccaaagatgaagttgtgttttttgtcgggtagttgtggataacagtttctttctgtttgactctgttatgattagataaagggttcattaatgtcttccctatgatgaatactaccgtatttgtgaacgatggagagaatgtagatctgattgttgaatatgaatcctaccccaaacctgaacaccagcagtggatatatatgaacaggacctccactgataagtgggaagattatcccaagtctgagaacgaaagtaatatcaggtaagaagagggcccggcactggacattacacgtttccccccacttccacttggcttaccagatcctaccgtgtgacccgtaaatgtatgagaggacatctgctatggaagggagtttggggctgcttcctgagtctccatcccagtatttcattttgctgtgtatttagcgcacatgaaaagtctgtgcctcagtttttttcatttgtaaagtgggggatagttcttccccagagttctgaggctatgtcacagcagtgactggcgtatactaggggcacattaaataattctcttcagagaaagaggagagtgagtgccttcaatcgtttccttaaaactttaggaaaactcagaatcattaagtagctttgggccaagcagtgaacttgagttctttttcatcaggcctctcatttgatcctcaaaacatttgtcataaaaatagtagcaatagtaacatgttatgaaagctgtgtgtgcttttttctgtcctgcactgttccccgtaccttatgtatattaacttgataagtttagtcctcacaaccctatgagtgggaactcttaatttcctcgtttgtataaaagaggaaactaaggcccagatgagttaagtaatttgaccgagatcagatgactaataagaagtcgatgcctagagagtttgtagttttttccagtcagaggctgttggccgttacaagaatgtgggtgagagatattggtgttctgggccaaggtctaagggttggagggaagaagatgatttggggggtgtccaggctacctctttaacaagattcagtgattgaaggggtaggagggagaaggaaggagctgaagatgtcccttgggagtctgaggccatcagccaggttggacggtgagaggagatacccttcaaggaggaggaggagggggagacagttcagcttggggtttgttgaattggaggttgaccgtgggatctctagtgatgttgaggtaggaagtatcctaggtcagcttccctagaagcagagcctgatacaagaattctctggcaagggcttcattaagggagaaagagccctgcccgggcgtggaggagcagggtggggaggggaaaggaagaaagaaaggatttgatctcaagggcactctggagctgggcatgtctcccttcccattgtcagtcactcattggctgtaaacctggtgggcagtcaacttccatgtgggtctaagcagccaagggcaaacgtgggagaaggttgcaggtgtgagtccttattagctgcccccatagcagtggggatgggcatgaaaatagctctgtacaggaggcgtagcacagaggagtctggcctagagatagagactcaaaagttgtgagcaaacagcagatagttcagtgtgagagtggattgccccgggagcgtgtgcggtgtgaggagagtctgaacaagccactgcatacgtccagtcggttgtgtagcccgtgttggtcaagggcactccatccacgctggagcccttatcgttaactccgctcagtctgcacagccgtatctggctacccgacagtgaaatagaagcttgaatagcaaatactgcgaaggaccctaggaagaagtaacagagggtggagggaaaccgggagattgtggggttgcaagaaggggggcgagggcaacaaaattgaccttgctgctcgggctctgcgctgtctgtatggagacagcctgcatgcagctgcctgccagtctggggttttgcaggcaggcgagttcaggacactggtgagagggcagttgaacaaaggaccgtgggcagaggacagggccgtgaggacagcacgggaggaaggagaggctgcagtctctgtgaggttgccttcatgctgagaaagcctttcctcattgtgtattctcacatgacaggcatttgtcccaaattaagtatgtgtgtgtgtatttgtatttgttgtttgtgaatgtggatcttgttactactgcattacatgagtcatttttcctaaccagacatgtatttccagaggggagctgtgacaaaggcacatcctctgaggcaggccatctaggtgtgactaatttatcgtctttctttgtagatatgtgagcgaacttcatctgactagattaaaaggcaccgaaggaggcacttacacgtttctagtgtccaattctgatgtcgattcttccgtgacatttaatgtttacgtgaacagtgagtaaaacaactggctccttatcatcttgttttttattattttaagttgtggctggtgtttgtaacagctgccgaactgagctcattgtgtactatgtaaataatgtttcatgataattctgaccttaacaaagaccccgtggtttggtggttggaagaatgtgtatgaaaaccagttccttgtcctacattgcactgaccacgtgaccttgtagacgtcgctcacattctgggtgctacctttgaagtaaacagaggagccacagaagttaaaaacaacagtggtttgagggaaaatgtattctttttgtattttttttttgaggaagatggcgctgagctaactactgccagtcctcctctttttgctgaggaagcctggctctgagctaacatccgtgcccattttcctctactttatatgtgggacgcctaccacagcacggcttgccaagtggtgccatgtccacacctgggatccgaactggtgaaccccgggccgccgagaagtggaatgtgcgaacttaatctttgccaccgggctggccccggaaaatgtgttcttgttgattgttgaaatggggagccagaggttgactagtagctggattacggtgtcaggtggaaggagacgctatcaagccctgacatgatttctttgttacagggctttctctttggagattgtgagattatttgtgttcagattgttctcccactaagatgaatgcaatattgacccagctcagagggtccctactgcataccctgtgggtgcaatgggagaagggagcgggcggtttagggtgggggatggccgtgaacacctgagtcctgccctgctgtggcctgcacccccacagcggcttggagaaatgtctgcacagaggttgaggccaagggcacacactcacccactgggacttttgccaagtgcgcagcttcctcctggctctcccatggtgccaatctgcatttccaaggaagggcggcagatgcctaccgcagcacaccagcctgggcaccagagcatgggaggcctccaaagacagaatccttgggattcccacaaaatgggattccccattttgggatttgtaggattcccacaaaatgaccattggaattagccaccctgggtgtgtgggggccgaggagacaacctggaacattgcctagaggacagcttagtaactgctgggtacttcgcgtgtgttgggctgtaggacggcagccagtcccttgtccacaaggagcttactacttgctacatgaagtgatttcacatcattatgtccttgatgctgcagctcagtggtgtagtgggctgggcagtgggatccacggaccagtgaagacgagaaacagctaataagtgatactcaggacaggtttttggttactaacctggagtcttttgactataccagcatttccaaaattgtgtttcctgaacaggatatgtgtttagataaagagggtcacatctgtgccattaaactcttttctaaccgaccgaccttctcaaggcgctcgctgtgctgatgtgtattatgcctcccctggagggggctgtggagggcttgtcccaagcttgtttgaccacagaactctcctttccaagggtatcatgttcattaatatctcagctccttggaacagttttgattatacggtgtctcattggcccacaattcaaatatctctagattaattcagatgttaattggagcagcttattagtgcattacaaatgggcaaaattacctgcttctgaaaaatcttaatattcaagtaatttacgagatgattgcagataaatccatatccatgtgagcataatatgcatgctgtccatacaaaactttattttgggggccggcctggtgggacagcagttaagttcgcacgttccgctttggcggcctggggttcgccggtttggatcccaggtgcggatatggcaccgcgtggcaagccatgctgtggtaggcgtcccacacataaagtagaggaagatgggcacagatctgagctcagggccagtcttccttagcaaaaagaggaggattggcagcagatgttagctcagggctaatcttcctcaaaaaaagaaaacaaaacttgatgctctcatatggtgcttcttaaactatctgtggtcaaagacatttttttttaaattttgaattcattctggatcaatacttcctataaaatagagtaagaaccaattactagaaaagtaaagcaaaaaagaaaagatatataagatacgagatcgtattttttttattattaaattcaacagatacaaaaattaccctgtcaaattgctccttctcaactcttgttctcagtttctgtgcttccctcgtgtggtccagtaacagcagattgtggacgtggcctactccgcagaccttgctttgagaagctcagtgttggggattttattaaattaaatgccgtttatctctctctttccctggcttcaagggcaaggaggcattaagatctgtttcttttcccctttttcatgctttcctttgccagtgtatggtctgctagttgtgagtcattgaccttagaaagatgtcaccgaagtcatccttacttttctctgggtgacagggttcctaccgttttacttgccaggctaatttaccatgcggcaggatcagtattaatcagttctgctggtgaactcgtgcctgtttgaaactagataggaaatggcatcaaccttcccagacaatcctttcttggattccctgttagtacaggaggccttttctgtattctagggcctgggtcacagatccccccacagcatttactgagctcctgcttggtgcactgagtgaagatgagggtagcatgtttgttctctgacctcttgggttaagctcttcaggaagtcttttcattgatgtcagtgtgttacaaacacgaaactgactaaaggcatttatttcacttacctaacaggttggatttcttgatctccaaatgctttgacaggtagcatttttatgtgaaacttaaaacatttgcctcttgtgaaatatgccccagttgctcttcatggatatgtatagttagctaatttctttgttgatttttttttcctttttggattgaaaaacaattctagtgaatactattatggggcaaaatttttttaagttaaattttaaaatcaaaagctaaaaatagttttaaaatttaaaattggagcagttgtgtccattttgatgtaatgttttagctgagccaaatgtatatgtggatctactgtatagtattctgtaaatgagcttagccccaaggatgaaagaaattacactctgcaaaaattagaattcataaaaatcagaatgataaaggcaaagaataagtgcagaagttcagggtacttttgctcagtaacattgatacctaattgcttaatagattcctgagaaatgctcatgaaaatccttgattttgaatggttaaatgtttggtggcagagaaatccatttgttttgaaaattctacatatagatttgaatatagtgggagagaggtgtgtgtgtgtgtgtgtgtgtgtgtgtgtgtgtttagattgtttatgtgggcggtttaaaaaaaatcatgtcctgccagtttgtgttaagaggaaaatatgtaacatgtaaagcttgaaaatgtttaatactatttttatttctctaactgaggcataatttacatgggtctgtaaagttggctcagtgacattaaaggtggtttataatggccaagagtcatatgtttgccatttttcagcacgacctccagaggaaactgatgaggattttcattaaaagacaaaacggccggccccgtggccgagtggttaagttcatgcactccgctttgggcagcccagggtttcgcgggttcggatcctgggcgcagacatgtcaccgctcgtcaggctgtgctgagccggtgtcccacatgccacaactagcaggacccacaactaaaatatacaactatgtgctgtggggacttggggagaagaagaagaagaaaaagaaaaaaaagattggcaatagttgttagctcatctttaaaatctttaaaaaccaatctttaaaaacaaacaaaccaaaaccaaaacaaaacaaaccagtgattctttgcattgaacttgcattgcttactgaagttgtatacagagatcatattcttagttagaaaaagtttgatgtcatttggggaaaatgcccatttgttttccttgcagattaaaattgggagaaaaataaagttctaagaactatcaaactatcccaaagtgctttaataggcactactctttccagagttcctctacgtgttagaaaaagtgacaccacccagattctttaggtagcttgcgatttttgcttggaaacctatggtctctttgattataataaatgtcacacaatgaagttttttttttaccaaatccaggacaactaaaaggacaaatgtgtattttaaccttaaattattcacttgtctcttttccctctccactcagtatttcttgaataaatttcaaactttttggtggacttaaatgttaatcagtaatataaatattttataagtttattttggcttgtattttcaactgtctcatgtgaatcctgaaataatttacaaaattgtgcaaagaaattatgattgatatgataaatcacttgtttttcaaacctctggaaagattttaagaactttttttttttttagctttattgagatataattgacaaatgaaattgtaagatctttaaagtgtacaatgtgatcgtttgatatatgtatacattgtgttaattaacacgttcatcaccttttgtatttacccattttgttttgttttgttttggtgagagcgttcaagttctactctcttagcaaatttcaattatacaatgcagtgttatcaactatcctcaccatgttttatgttcgattatatccttattcatcttacagctgaaagtgttgtaccctttttaaaccttatccggtagcatttctagatcagtattacaaatctaaaatttgtggcaaatgatatctaggagccataagtagatctctttcccatcttaaaggtctgtccttaatgacaaacctgccagttgagtgagagtcctgtcaggtggtggtagcaggacaagtaaggtatagagaacaaaagggctcctcttgtctcgttggctttcatggagcacaggtaatgttaagctagattgggtctccagatgactgctgaactgcaccaaattaactctcaaaagtcacaaatttcactccatttactgtagagtgttaacaaggggttgaaacaatttaaggaaatgctaaataatgtattatttctaaatcactgcatcatgtaattaacatcctgtctggtgtgagtgattatttatagatcatacagtatacccaaatcagtcaaagtaataaatcacccagaatgaggcctcttgatgagaaagtttccctttgaccacatttgtgaaatctgggccaccttttatgtattttttggttccaaagtgaaatccagttacgcatggctcaacaatccttctttttgggagtagcaacactctacaaataaaggacgtggtccgtctgacatttgccaaaggtgagggtatacctgtcaagccggcagtgtagatggctgactttggacagactgcctgccagccgtctgggtcacccacctggctggaagtctccaggacctttacccagggcacaatagtaatggtgggcttgccttcaaggacttctcagttggggggcttttaagatcctcatgaaatgagagtgaagttactagaacttagagtttttggaaggttggaagcgttttcctacctgttaacctgttagccattctatttttgttttttgaaggttataggcaccttccttccaaacacttgggtgtccaaaccgttcttgtgttagaggctaagaatgttaagactaactgctagcccacttatctgttgagttttgcttgagagactctgctttttagtggtggtgtttttttcctattaagtggactctaatagccctacttctatgtttgttaaattactggaatccttaaacattaaataaagctggtgctgaatagaactccgtttttatttatttacttacttttgagagtttgctgtaaggctacgacagtaaccacagtagcttggtttgtgcaaacatttgtgtacatgtatttttaaattaaaacaattttttttttgaggaagattagccctgagctaacatctgccaccaatcctcctctttttgctgaggaagactggccctgagctaacatccatgcccatcttcctctattttatgtgtgggacgcctgccacagcatggtgtgccaagcagtgccatgtccgcacccaggatctgaacgggtgaaacccaggccgtcgaagtggaatgtaggaacctaaccgcagtgccactgggccggccccaaaacaattttttttattataacaatgttatgtgaaggatagaataactagaaaatataagtaagcaagaataaatatcaagcaagttttaactgtacctttttaagtttatttacattttagagatatcctttacttccagaccattaaaaaaaggtggttttttttggacaaaatgaggtcctattgcttcataaccttggcttttggtgctaaacgaggaaagcattgtgagcatctttccatgtcataaatgctcttctgtggcatcattttggtatctccttgcatgggtatttcataacttcttgaacccatgtctgatgcaattttgagacattgtggagtgagagatgggactctgaaatggtgtgactaagttttaaaagaaacccatcagacgattatttaaagtttataattatcttgtttaatctcaaatgagcaaccttgcctgagtgcccaggagtcagtaaggttatcatctgttgttatctttcatgctcccacatcttgaacatatgtcgtggattcactgcgctggacagatctgaattcaggaatagttttcagatcttcttagtgtggtagctcatctctgtgaaaatagttgcttgtctttttacattaatctttttataagcaatatgtgttcatttgagatatctgacggttgaactctgtttttattttctcttcctgaacttgaaatgagtttttgttcttaaattgctggggagttatgagtgttgtttttgatgtgacgctttaatagctccttcttatgaagaggatctctgtggatatgagaagtgttatagacatttaaatcaagcaaaaagggatatcatggcaacctacttttaaaatagaatttgactctctcatgttctgagaaaatttaggaaatgtggttctgaccaagagtctcatttttcccaccctcaagtcctgttattctttttccttcgtgtctcctaagacagttggtctgatggagcgtgttgctaagttggggatttattaaatgctgaacctgttcgaaaacaaggtaacttgtgtagatggttaagccctttgttgactgtatttgcgtggtctggccattttttcatgtgtatggtggaaaagcaagagaaagaagtttagatatgtaaccatgtaaacttctgccagcactgaccctgaacttgggacctaacttttctaaaaacagcaagagtagttccttttatgtttgtggaacttctactctatggaaatttcccttccagttgagccacatgtgattttacatcaagttagctctcttcatttacaaatgtatgcagggtcacctctaatttagtggaaatttaaaataatccaagaataggtacataatttttccatgggcattgtgtcaataacctttctcctctacttgtgaattaggtggcaaaatgagttccctactctgacagagtagaaaaatagcaaaaatcgcattttatctcatgcctgccctccttggcggcaggcagagttgcattgtgaggcaggtacacatcacctgccccatgtctgggtcacatggccatggtgctcctgtaagttgaacccagtgattctggctgaggaagcctctctccaagtagtttcatcattttttttttttttttgacttaatcgtaagatttgggagatctttttgatggctgtttagaacaggggtgggcaaactatagccctggggccagattcagcttacagcctgttttagaatggcccataagccaagaatttttgtgtttttttgaatggttgaaaaaaaatcagaagattttgtgagacatgaaaaaattcagattttcgtgtctgtaagtaaagttttactggaacacagccatgcatattcatttacatgtctttggctacatttgtggtatggggtggagctgagtacttacgagagaccctatggcccacaacgcctaaaagatttaccctcacgccctttacggtaaaagtgtgcttccccctagtttggaacattacttcattaggagaatgactttttttttttttttaaatgataaacagtctgttgaagataactggatacaggagactatagttgaagttttgtttcatcttttaaatttctgttaaagtgcccagccagtttttggctatcttgaagaatgtctaagacaaaatttatttttaaaatatctattctgggagatttttaaaaaactatactattccttttatcagtaaaagttaacctgagtagtacttctattttagctgatttaaattcctttattgtaacggtactatgacaggaatgtagatttgacccagactcccaagccaagataggtgacaaattgctgcaaagcattggccattaaaccatcctaaaaacaaatccatccttaggatctctcttcatttagttttattatttggagacttatgtcatcgttcttagtcctgctattacagagtgtgggcaaattttatagcaggagttggtcggggtggttagagagaagagctgtattcaaaaatgcttccccaccccattacatgtatatctcctcccaacccaccccctcagctcttgtaatctgggctgtgttcttagaaattcattttgttcttgccttccctatggacctaatggtggtgaaaaggagtatttttcaagatcacatatcggttgggtaaatcagtgaatggttaggatttttaattgcatgagcaataaattctcagtccagtcataagcactctgaaatctgcctacaagctgatcagtgttgttggagacaccggaatgactcaggtccataatgctttgaaggaagaaaaggctaatttttatctccacaggaaatacataactcacacacctcttaggcttatctaaacctgcaacttgggaggaattagggaaggtgtcatttggtctacggctgattgcagaatatctgagaaaccacagctcagacttaacctggagaactgcagggagttatgtatctttaaaagcaaaatgtatacttaatgtcttaacatggtgcaatgagggacttacaaaatgcagatgagcccagattttcgtttttaggaatcagatttatacctagctcattctttatgtattaaacatttcctagtgcaacttgccatgcacagcccacactgtactcgtgtaactcagcctttgcagaaggaagtctctcatccccaatgttaagaacggggctggtattagggtcaggccagagaggcacctcaggtgccaatttaaggaggtgctccctcatggtgccaaccctccatttgcaaaaccttgagggtaagtgtcttaaattctgcacccttcatgcttttcttgcctcaccctagtcccagccctggtcagggtcccttgaaggtacttttacaaagtgcattgctgggtcagatcctaaacctactaagtctctggcaatggggtccaggaatctgcgttttaacctctttgcaaagtgcttccaatgcacattgaagtttgtgaacgccctgagcttggttggccaacctcaggcccaagaggacataagctgctccttgagcctcaggttatggcccacctgggatagtaccttaaaaacctgcctaattaccagcacacggaaacagggaacaagtaggacatccagacacaccatttgccagccctggccattgtataactgctaccaggtgtcacgctggaaggcttggatcgtagagcatttgtaaccaaagctacatgtaattgactatgtaattttgagccgttccaacttttttaattaaaaaatgttttataggttcattattagctacgtgttcattataaaaaaatggaaaacaagtcaaaagaaaaaaatagatactatttgtaaccctactacccagagataaccattgttaatatcttaagctatccttttagcctcttttggtattgagttaatatttaattccactagaaatccaccatgtagccttaggaaggatgagtgacaaaaggaatgtcgggataaggaaatctgtcttatgaacttgattcccatttgagtcctatccagttatctttgctgtctgtgtatagacccttctcttcattaactgcagtattaaaaaaaaattcacatgacccaggtatttgtgtgtacttcttattttataactgctactgcaaaaataatggaaatagtgcccctacacaggaaagtgaccattaggctgttcttccagtcccttcttgtgactttagttgaattcatttggaatctgaggcacttattgctttggggaggacttaatcgttcaacagctcctactgtgtgtctcccgttggtcaggctcttcaaggagtcagagggacagtcagtaagatgtggttcctgcccttgagaatatagagtctgattaagagtgtcagctgctcttaagtgctagcgagaagagaccaaccaccttggctttggcgagttgaggatggctcggaaaaggaggtgacacttgtatcgagtccagagagacccaccgtatggcgcctgtggtctccagcaaatagccttctcctaaagttccactgtttttttgtgttgtgtcctacttttcagcccaatcacacagttgcccatgataattaaatgaaacttgccagatggatgctttcgcaagacgattgctcgtcttcttgctctatttgtgaaagctggcatgggatccaaactctcaaggatgcccctaccttgagattgctttggagtctcgctcttttgtgtgtattagccaaatggcctgcccatcagcagggccaggttgagtgacaggtgggtgtgccatgcatgtggatactccgttccctgccaagccattttgcctgcaaggaggtgaggtgctgagagcttgttccacaaagatgtcatttatcagtgttaccttcctttgaggaaataagcttactaggcttctgggctgtcagtctgtctttctcaccacatctattgttcccatcaatcgcagcaaaattgatgtcagatttccagtgcatcgggttaaaacacatgcgcattatcacactcttaaagaagtaatttttagatcattgaagagaatatttaggctggcaagaaaagaagaactgaatcattaataataattcttaaatttttttgtttcatttctgtgaatcatttttagttctttgtgctttgtgtgctccatctcattgaattgtcacaacccctctgtgaagtgggtactgttgttcccgtttgacagatgaggagatctgatccagggcagagagctgatgggtgtttgtagtcggtgttcaggtctgtcggccacacacatggcctcccgtggtcctgtgctcaggcttggtgctctcgatgctgtaccagggagacagggcaagctcatccctgtccccaccaccggatgcttacagtttagccaacttgttctcagcaggttagaatccttcaaatagattaccaatagaacagctgaacgcaagttcatcttccttccgctttagaaataatctcaagaatttgcagtgctttagggcacccgtgattgaatatcagttgattattgtagttacacagaaatgtcaaattagagcattcctgctgatataatttactttttcggtgattgtactcagatttagatatatatatgaataacactctcgggctggtttcctcttctaattttctgtctgtgttttgcatttgaaataaaaatttggggttaaaagcccgtatggtattttactcttaggttttcgattttctgtaaaaagggtgattaacctatttaatatctatcacctcttcacccctctccccaaaagaggaaatttccaaggtgggggggcttctcttttcctgtaacaactcctaatttcatccattccagtctctacaatactttgaaagcccgatatcaggaatcctttaaaccaaatttccacctttaatacagtttggaattccagagtcttgatttagaagcggtctgtcagattccccctcactggaaacagaaaccctgccaggtggtcctgcaacctccagatccccggaagagccagttcacagacctccacatctgcggggcggacagtccagctgggctgggcagctctcactgacagcctctcctggtttgacccctcacatccacctccctgtaccttccacttcctggttcagattctcccctttgactaacatgttccctccgggtcttcttcagcctcaagaaggtgctaagttttctaaaagaatggagtgaaccttgatgaggttttccagcaatctgacgtatggccgcttctcttttcctgcagcaaaaccagaaatcctgactcgtgacaggctcatgaatggcatgctccagtgtgtggcagcaggattcccagagcccacaatagattggtatttttgtccaggaactgagcagaggtgagatgattattttgggtcctacttaacacgcagaagggatggactgcgattcacttgcatttcaaatggtgttttcagattttttttttaaagctttgttttgcttattatttttttctatccatgtggctttttagaggtcataattgctatatttttcttggtagacattaattttgtttgctgaaaaatgattactgaatgacttctctattttgctggttatctttttggatttatcgtgcaatttccagcctgcaggtagataaagcaattttccagggcagagtaattagatttccattctatacacaggaggtaatgtgtgtgggaaatgcagctgtagttatcatgaaaaaaattacctcagaagttaattgccaagttaccaaaaagtaatgatcgcgcaattacaacatacacgtggtgtttgtaagcggcgggttttcaaatggttttctccttgatgaggtgtcccgcctctgagcagagcgcatgtggcaatgtgcttcctctgcctcacaagcgacccttaagccttaaattgtcctttcacattacctgaagatgaaaatggggtcaactttgctgtttttatccatcaaaagctattttatgctcagggtttaaaagcccagtgtaacatcacaattgaatagtcaagataataatagaaattttatttttcatcaaatagacctttttatcacaacaacttggaagaggttgcataggagtgttgtcagctgagttttagtggaatgttttctgcagggagtaatagggagggttcaagacccctggaaagcatgcccacagtggaagcaactctggtaatacaatcattcattcagcaagtatttttggagcgtcaactggatgctaaacgttggtccagtgaacagaacacatgtgaaccctggctttgtgagtttatatgctaataggtggagatgggcgaaagatgaaataaacaactaatgcgtacaggtgttaagtgctgaggagagaaacaaagcaagagaagagaatagaaaactgctaggcatgtgaggggtatgggtgatttcaaacggggtcatcagggtttgtcattgcgacctagagatacagcctgtacctccctccatagaacctggagctgcagggtcctcgctactggggttttgggggggttgccctgttgttgtcctttttgagactttaatgctttcctcctgcatgcttttcctttttatgctttgtacatcctcttgcaattagtttatttataagggcctactttgtaccgggatgtgtgccagccatcttacttaattcctctctaatcctttcaataaccttccaagatgggcacgaccattccagttttacagctgtaggaactgagtcttgaagaatttaaataacttgtcagaggtcaacagattaggggtttgaattcaaacccacatctcactccaaactctcatctccctcttccttctcttccccggtgctttccctgcttacggggccacagaagtgctcattcgtcatcactctctgacatcagcgtgtaaaaggaaagttccaatcttgaacccttaacttagttttaaaagtacgccagatccgaggtgttggattggctcactgattgattttcctggagtaaatctgggctgttattttattccccctagatgttccattcctgtggggccagtggatgtgaagatacaaaactcatccgtgtcaccgtttggaaaactcgtggttcaaagctccatcgattacagtgcattcaagcacaacggcacggtcgagtgtagggcttacaatgatgtgggcaagagttcggccttttttaactttgcatttaaaggtaacaacaaaggtatatttctttttaatccaatttaaggggatgttaggcactgcctaccacgtcagtcatgattttaagtccattccatcattggccatgtcatttctggtaatacctgcattgcgttctactgtcatcatactcactacgtttcgttctgtactagtttgttaaaattcatgcagtaattttaaccatgtactatatatattttatgtgtgtgtgcgtgtacatatgtgtgttctgtccatgcacatgtgtgtgatatatatatctctctaaagaaattgtatgtttccaattgtttccattaaaaagagatagagaaatcaaatagggaatatatttaccttatgctcaaacagaaacagagcaatttaaaaatttaagttcaatttaaaatttcagttatttaaaatcagttattttaacacattgccagacactatatgagagttaacactgccttttatggtgtcatgttagtaagttctttctataacatctttaaagtttgatttatgagtgactagctctcctaacgtaggtgaaatgatccttgtggatgaaatgatgaattggtatgaagttagaagacaaagaaactgagcacctacatttttagggctcaggttttgttttcttgagttggcaaagatgaatgccaaaaagtggtgaattttcagtttttgagtaatgaggggaagaatgttacattgttcttcgtcatagtttttttcagacagggcaatgaaaggaacacattaaaaatgtttttctcggtggttaaaagaaattcatgcttgatatagaaaattgggaaaatacaggaaagcataaggaagaaaatgtaaagcatccgcaaaggaaactggctaaagttgtccaaggcaggagttttgttgaggtacaaagttcattcagatgttgcttttcattgacaaacagcataaagttattctttttttttttttttgaggaagattagcccttagctaactactgccagtcctcctcttttttgctgaggaagcctggccctgagctaacatccatgcccatcttcctctactttatatgtgggacgcctaccacagcatggcttgctaagcggtgccatgtccgcacctgggatccgaaccggcgaaccccgggctgcagagaagcggaacatgcacacttaaccgctgcgccaccgggctggccccataaagttattcttatgctatagaaatctcaacttctcttccacagtagtctggtttagagatgttatttttaaaaattcctttgactaacaagagtcagataataaccaaggcacacagctgagatgccggtggctttggaccctgccagggctgtgagatgggaggtgggtgagcttgggtttccgtgattgtggtgaagatcctactctgctaataggctgtgattccatgttcctctctcattttagagcaaatccatccccacactctgttcacgcctttgctgattggtttcgtggtcgccgctggcatgatgtgcgtcatcgtgatggttcttacctacaaatatttacaggtaaccatttctttgttctctgccctgagggctatcctgcctgaaacattaaccattgaaagatgatgtctctttccctctctccgcccgcagaaacccatgtatgaagtacagtggaaggttgttgaggagataaatggaaacaattatgtgtacatagacccaacgcaacttccttatgatcacaaatgggagtttcccagaaacagactgagttttggtcagtattgaaacgggggctttccatgtaaacttttgtgcacacacaacaatgactttaggaaccccagtagcttcctttgttttattccacctgaaacaagaagtgttttatgtgaaatttcaccacctttgatagctttgagctaaagtatattttagggaaatatgtctagacaaatttgtcttcaattcctttgttgattttgaaaccgcaccaatggtccctcaccatcactgccacttacttccttgtcttcctttctacagggaaaaccttgggtgctggcgccttcggaaaggttgttgaggccactgcctacggcttaattaagtcggatgcggccatgactgttgctgtgaagatgctcaagcgtaagttcctatacgctacggtgcgcactcaacgtcagttttccaaatttgcttttttgctaaaataagatgtttctaatttttagcaagcgctcatttaacggaacgagaagccctaatgtctgaactcaaagtcttgagttaccttggtaatcacatgaatattgtgaatcttctcggagcatgcaccgttggaggtaaagccgtgacccgcttgcattttatcacctgtcgaattatcagaagggggagattttgatatgattttgacaatgcttgattataagctccttgcaagatttttacccaagttgttgttacctcttgctagagtcccccctgcaagagttattgttgttaagagtgtatattttagttttctcatcgtggggtgggatagtccatgacataccctagttactatcacgtatgttgcatccaaagcattgacctcttgaatatctcgagaatgtctcatcttgtgcccaaagcttttctttttatcttgcaagctttgttttgctggatcatatttagtcactaaagggttaatattcatttgcatatcataattaaaaataggcctttaagcctatcagctcacaaatatacaccaaatgaagcaaacacctcactcctgtaaaaaataaatttccaattctaaagcattagtcaagcctcccatcaaggatttctgtggtgtttccagaaagcattttggtcttaaagaaacaaagattagtaaaacgagctgttccttgagaactggagagatccatggtcacgttgacagctttatataatttcttaaagcagaccccatacctttttgcctcaccacgtcatgactcattcgtgagaaatttccgcccgagttaattagttgcttgttaccttcagagctgcagttttaggcattcacaacaccaaaaaacattttcgcctagtagtgctcagaacgcaggtgacgccacctcatttcaggttgtcacccgctttccagtctcgtctcagcgagctgggctgttccgtgtggttggttttcctcttgtgccgcagtttgcgctctcatcgtttccgtaataacgttaaccgagaggcgtgaagccccactgtaaactgaaggaaatcaaaggatttatgtaggacggttgatagtagcgtaagtaactcctgtctgtaaaaccagcagtcacacctggcccctaatctctcagaaattcaggtaaaaaggggcttgctcatttagttttactccaaataatgccgggttttgataagcaatgttaatagagaggattgtattggaactaagtaggctcatccattgaacctgaatattaatgactctgatcacccttgggtattttaatgggaggcaagattgtctatatgtctcacctctttctacccttttcctatatgctcgtagggcccaccctggtcattacggaatattgttgctatggtgatcttctgaattttttgagaagaaaacatgattcatttatttgctcaaagcaggaagatcacgcagaagcagcactttataagaaccttctgcattcaaaggagtcctcctggtaagaccaatttacatagatagctgtcggcaggtagttcgtggggtcataagggtttgcaatcaaggctaattctttaaaaaaaatgaactgaggtcctttgagatgcaaaatcagaattattaagtcatttaaatgtgattaaccatttaggcagttcaaatagtgtttttaaagattcaaatggtgttaaacttagatttttgttgatttcttttcaaatgcatccttagtttttttttctaagctttagttctgttcaactgaaggaagtctatacctgtttctctcatcgtggttccgctcttggtgtcattccatttatactgtggagcttggtcctatacgcctctttatagggagatgctgtttatagggaaaacgggaaaacttgtcaagttgtcacagtaaattcctttaaaaccttcaacaggatggcagaaagctctgaacgtatctctgcttttaggtttctcgctgtctacctctgaattatttctgtataccttacccttgtttttttttaaacttatcatgctataaaaagacactacaactgtagcacatttaaaaaaaattctgttgcttattttcatctctttcatcattgatagcattctgaatttgactgatgtgtaaagagcttcaggttcctttaaggagaatgagtgtggtttaccaccagaacagaattcttctctgccatgcttggcctgttctttccagacgttgttaagatccaccacgtaagaagatttcccagactcacccagcccaacaaagtcatactcatcacgcccagtcccttatactgtgtatttctgtggttgtatggagggagtctcctctccattttatttgctatatcccctacatttccagatgacaagattttgtctcctgaactcttaacgccaggccctcagggaaacctcagtaaatatttttgatgagcagttacccttagagcccttttctgcacctctggctaaagttttttgttttgttttttttttaaagattggctcctgagctaacaactgttgccaatcttcttttttttttttccctacttttttctcccaaattcccccagtacatagttgtatattttagttgtgggtccttctatctttgctatgtgggacgccatctcagcatggcctgacgagtggtgccatgtccgcgcccaggatccgaactggcgaaaccctgggccgccgaagccgagtgcgcgaacttaaccacttggccacggggtcggcccctctggctaaagttttaaaccccaggtgaagctttttaacttttttttaatcctgtaaacttgagtagtctgaagtggtaataaaatacagtacaaactaccttttttggttactccagagcatgtgctctttatatgaataaatgagctgctttgccttatttctaaaactttggccacatatgtatttcttaactttctgagataatggcctgcatcgttccatcctgcgtggtattctttgtgctttgggatcccatatgggattggaacccccagcacgctctgaaggagattgttgtcatggtgtttctatgctaatcagaagcaggaagtactagaaatcttgaagactctccagccaaatgttgcagattcaagaggtccagatggttcagaaaatcatccaaattattggtgtttatctgaaccaaacttgattttgttaaaccttctcccatcagtcactatatattaacaatctctgccttcccccacgtaacgcgtctcagaagctctggttctttgtctctttctagtttccttcttcttgtctcttggggctcatttagagagttggaagtactgtggcataatgttttcggctctctgtttcccattaaatccctggtgtcaaaagatgggaaatttctaatctgagtcccacatatgattgaacacaaaaaaggccatctagctcctggggattggaccctaatgtgtattaaaaactcctctcttactgaacaagatttttctcattcaaacttggcaatacttttctttgaataaaattagcatattttgtaaaaaagggagtagggaggtagagcctgctccatgggtgctcccccgctttcctattttattcaatcgtcatttgatggatgtttcatctctcccagcaatgatagtactaatgagtacatggacatgaaacctggagtttcttatgtcgtacccaccaagacagacaagaggagagctgcgagaataggtgcgtacctatcaagcaataaaaacagctttcttttaccgaggatttcatatactactatgaaatgtaacatcattcctggtagtgcctggttctccttcacgtagggtctcatggccatgccaatgatcaatggcagttaagggttgcaagcgggcatttggggtcagagcatgtgttactgtaactgagcatcttacttgcataaaaatgtatgcatctcaaaatataccaaatatatgttttgcatatcaaaaataagagatttttgtattattccaccatccttctctcctaaagattttgtaacttagtccaggattgtaaatactaactttgtgattcaacacccacctttcctcacactggggaggcaatttgcctgcaagttcacatccgttaattcgttaccggcctttgatattgttgttgtcgccgtcttttattttccttgccttgagggttttaattgctgagaaaatccttctcctccttcaggctcgtacatagaaagagacgtggctccgtccatcatggaagatgacgagctggccctagacctggaagacctgctcagcttttcttaccaggtggcaaagggcatggcgttccttgcctcaaagaacgtaagtgggaagagtccttttttttttccttaatcgtggagcattttagagccctagttagaatgcagagtgtcattttgaagtgtggtaaccaaaagcacaggaaatttagtttcttcatgttccaactgctgtctctttggaattcctgttctcatttataagctttaatgtgtaagcctgtctaaatgagctttctatgaatatatttttgtatgcaatgaattcatgtaaaacttttggcttttaggatataggagctgctctgagaaaatagagaaataattattttatcagcaaaaggagcaggtacctcatgtagttgcagtgcttggtgaagcatatacttgagtcttattaaagttagaccccaaatattgcgtgtgtggtttgtgtagtgtaggggaagaaccaatcaggataataaacatttgggaaaaagacgggggtggagagagaatgatggaaccataacatggaacatggtccctggataggagagaggagttccctaggacatgggactagcagaatagaataagattacagattctgcccttaagtgtcgttggtgacatttccaaacaattaccaaactaaaagaggatataggatggctgaaatagcctcttccctgtgtccttgggagatgtcaaattgaagttgcaaagacattttagaaactctgtaaaaagacagtgaaagagaagcatgcaaaatgagttctcagtttaaaaaatatgatacaactatttataatgtattttcctgtgaatgaaagccgtcctaagaagaagaaaagcatttattggagttggttttgaaagtgattatagtaattaaggtcctaacgatgagaaacacaagttttgaacatcattcagagcataatttagatatttatttttggtgcactgaatagtttaaatgtaaagcaaaaagtattggattggtagaacataagcagcattctagcattaaacatagtttcactctttaaaagtttaaaataaatttaaatggctttcttttctccccctctctcctaatagtgtattcatagggacttggcagccagaaatatcctccttactcatggtcgaatcacaaagatttgtgattttggtctagccagagacatcaagaatgattctaattatgtggtcaaaggaaatgtgagtactcactctctgcttgacagtccagtgaaggattttagtttcacatttttataataagtgttttttatgattttcgtaatgcaaatgctccctttgagatagcatgcattttagcagtcaaattaagtgtacttcagcaaaatttgtgtggtattgctgaaccttactacaactaacattctgataataggattcttaattctaattgtgtaattatggggcacgtgaaagaaacagaaatagccttaattttcattatagcctgagaatagcaatgaactggattttgttcaagtgaaacaaatgcagacctgaaggtcacagcaggagaattttattttgagattgacatgctatgtgaaaaagatgaaaatctaagataatgttcagaattaggtatctagtgtgttggctctttaatcaatagagagcttattacataggttcataaataataattggtttatagaacatagtgattttatttcagaggcctttatttcatggccaattttcattgtatcatcagaacaaccccttggcattagaatgcagtgtcctcatattctaggagttggagaaactaaagtgcagtatattttagtgaggtttgtctgagatgacatggtcagtagaggcaaaaccagagcccgtgatttccagatttcccattagttggaagccgtatagttctgtacagatattcttctctgtctgttttcacagcaccgtttctacagtccagatttattcctggaggtagctatttgtgtgccttataataatgtaatattttctcctccatcactatggcatctgtataggtaggctatgcttgacttggttttgtagaaatgttgctgggtttacttccagactaaagcattgcatttctagtaaatcttctctgaggctagatttcatcattaggagtgttaaaccaagttctctccatcctggtgtactagcagaggaaagaatgaaaggtggttccttatccaggcctttgaatattgacagaagggcaagaggaagaaggtagtgggttctggacccagtcttgctgaatttgaatctgattctgtcatttagcagctgtgtaattcttggcaaaaattacctaactcctctgaatcttggtttttctcctcttggaaataatagtgtcacctgcctcagttgttatgaggattaaatgagttaatatatataaagtgctgaaaacagtgccagacccagtgcagctaacacttatatgtggcacttagtattctgactattctttatagatgccttatttggaatataaataatcatgaaagtggttatgctgaagcttcttaatagcttgttattagttagtgaccttagttggaattaacaaggatgggttaggtccccctaggcttccagattgtggcctccagctcaagtgagctgaactaacccatcgcagataccactcttcaccaggctctggataaggagaatttatggggcaagttaaaaccaaggaaactcacacaaagtgttactgccccaaaatttccatcagagtcattggagatgtccctgtggtgccagtttctctgaaaattctcccattttgcatgggttcttagtcatttttgtgccacctctttcataatctaaggatggctgtggatctcttatcagaacactattttaaattcataaaataaaatacataggattaccaagaaaagcagttaaattgaaatacagttatcaaaatattaaaaagtaaatttgtgatatgtcaatacatgtgcttccttgttatacagaataacatgttctagctctgggtctaaaactagtataattcaaagtggtaatgactgtaagtattgcaatacaatgaagatacctatgattactgttggtgacaaagtcacagtgctttattatcttcatttgtaatttaaggaaattaaacttcatttagaacttagtagaaacaagaatgtaggttttccaagttcacagtcccgcgaatttaagatctcgtagatctcaggttaagagccctataggaactttagcaccaaatctgggtgaggatactggaaggatttttttcccctactgactaaaataactttaagactagaaaaaattgtcttcccagctttcaatcctaaatggattaagaagggatcgatttagctttttatggtagattaagatctaggaatgcagaatgtctctcaaatgcataatagtcacggaaagtttaggtctgttttagcagaaagagttcaggatgtgaagtctagcttttgaatttaaactctgaatctgctgcttgctgccttggaatagtcataatcatcctaagctgctagtctttattgagtgcttgcttatgctgggcagttttcagatattagtgagttgggcactactgtgctaagcactttcacccacattgtttcatttaacctgtaaaacgactcatggaattgaagtatattatttttgttttacagaagaagataccaaggcttacttacagatatttaagtgactttcccaatgtattagtaaggggatgcttttgttgcatatgacagaaaacccaaaaggaaagaaaaagaagtgaaggagtggcaggccaggcatgtatagaggttccaagaagtactcagggaccaaatccttccacctttccattttttaccatccctgggtgtaaccctcatcttcatggtccagaagggtcatcagatagccagccagcacatccagaaggcaggatggagaaagggacaagaaggaaaagggcaaagggtgttttcctaaagctgccaaacaactcttctaacttagtggccaaaactgagtggcttcatggctacacctcactgcacaggagctgggaaaatgaggcccttattgtgggaagccatgtttctgttactagaggaaaaggggaaaacatattcagtggtaactaacaaatctaacaaacctgtgtgttactcaagccagtggtggagccaggattagaacttgtgtctgtctctgacgtctgtgctcttaatcaccatgctgtactgactcaatgtcgcatcttgaaaatgggcatagtatacctgtggtccacctgtttcagaggtacttggggtcatctgaggccatacaggtcaaaggcctttgtgagatggcagtcaagttctcaccctcacctctcagtgagagcaacatctataggaacagtttctattcagttcttttgaccttcttaattatcattgttggatctgttgtgcttccattacaggctcggctacctgtgaaatggatggcacctgaaagcattttcaactgtgtgtacacatttgaaagtgatgtctggtcctatgggatttttctgtgggagttgttctctttaggtaaaatgatccttaccaaaggcatcttgattagacttacagcatcttctttaagattttatcagtgtcctgcttgcttattattcacactgatttgtaaactgtctctgcctcaggaagcagcccctaccctggaatgccagtcgattctaagttctacaagatgatcaaggaaggtttccgaatgctcagccctgagcatgcacctgctgaaatgtaagggccaagatgtgtttccttcttatgatgtttccccttttactttcctttttaaagacagaaacccagatgttgagggttttcactagcaaggttgaaatatcacttggttcctttttattgcatcctgttcaaatgtaatttctgtagcttattttcgtaatctcttgtcaccaaatatccagaaagtttcaggaacatttcatacatatacagtgttttattttatgcacatcattcagtatggccagttgcatggccctgagattatttttgaaattgttgcacggcatacacgtgaagacaggttaaaggcatggaggggtgatgctaaatggcccttgttttgcaggtatgacataatgaagacttgctgggatgctgatcccctgaaaaggccaacattcaagcagatcgtgcagctaattgagaagcagatttcagatagcaccaatcatgtgagtacactctggacagacatagaatttcccttctcttggttccaagtgtaccctccttctcagggtctgggggtgaggaccaggctgcccaccccttccctccttggcttgggctataaattgggcttggagtaggaaagtaaagcaatggaaacaagttctgtctgcccaacctcccattctgagccaaaggatttgggatgaggaggggaaagtgtggagggctttacacccagaagtgtggaagtacaagtttccataaggatttgccatgtttcctcccccaccccaaatcctggtcatgcggtcggcgtgttctctctctcacatgttatggccattcaggctttggagggttggggggatgtgaactagaataaaagcatagaaaagacagcttgttacggcagtgaaataagccttctgcttaaacaagcatagccagaaaatggcagattgctgtcatgcccacaagtcacagagaatgaagagttgtttgaagttgggacatccctcccagtgatttggggaggggggaattcaaaactcaaatccatttatttcctctcctgcttttaaggaagaattagtgatccttactttgactcagatttttttaagctgctttttttctggattgtgtgcttggagctatgttttctaagagtgtatatcactgataacttttgggttaaagcttgcttttccagatgtcaaagcatatttcaaattaaatagcattttccacccaagtgcttggttctttttggaagacccccctggaaaggccatcgatttctcagcaaattacatcggctgttgggttgtagttggctagaaagatttataaacccttttagtaggttagatagtacttgctctgagatgtgtcccagcagaaaagcacattttttttggccgtcacttcttatataatcagactttggggaaaatgaagggtaaaacaaaatatgtattttcttttgtcaatatgatttgggttttggctgtggtcttgtaaacctcttctctttaagagtcttcatcagttacttgcagttccgaagctgcacacatgcccctctgttgctgtgtgtgtagtggggactggtctgttgactacggacttgttctcctcagatttattccaacttagcgaactgcagcccccgccaggagaactccgcggtggaccattctgtgcggatcaattctgtcggcagcagcgcttcctccacccaacctctgctggtccacgaagatgtctga

SEQ ID NO: 23 - DNA, 50 bp, Homo sapiens
aacacgattctgtttttcttggcaggctcttctcaaccatctgtgagtcc

SEQ ID NO: 24 - DNA, 50 bp, Homo sapiens
aattccatttatgtgtttgttagaggtaaatgcttggctttctgcagtgc

SEQ ID NO: 25 - DNA, 50 bp, Homo sapiens
actgattttggatatgcttctatagatcctgccaagcttttccttgttga

SEQ ID NO: 26 - DNA, 50 bp, Homo sapiens
aaattcatcctgaaagtgaggccaggtactggctctttcttatctgcctc

SEQ ID NO: 27 - DNA, 50 bp, Homo sapiens
ggggccacatttcttttcattctagccttcaaagctgtgcctgttgtgtc

SEQ ID NO: 28 - DNA, 50 bp, Homo sapiens
aacgtggaaaagagaaaacagtcaggtgagtgaatcgcttcattcttctc

SEQ ID NO: 29 - DNA, 50 bp, Homo sapiens
ttttctccttttctgaaaccagcagactaaactacaggagaaatataata

SEQ ID NO: 30 - DNA, 50 bp, Homo sapiens
gtcacaacaaccttggaagtagtaggtaaatacctctatgggaatgttta

SEQ ID NO: 31 - DNA, 50 bp, Homo sapiens
ttctgtcttatttcattctaattagataaaggattcattaatatcttccc

SEQ ID NO: 32 - DNA, 50 bp, Homo sapiens
agtctgagaatgaaagtaatatcaggtaagaaatggaccttgccctgggg

SEQ ID NO: 33 - DNA, 50 bp, Homo sapiens
ttgactagttgtcttttctttgtagatacgtaagtgaacttcatctaacg

SEQ ID NO: 34 - DNA, 50 bp, Homo sapiens
atagcatttaatgtttatgtgaatagtaagtaacatgaagggctcctttt

SEQ ID NO: 35 - DNA, 50 bp, Homo sapiens
tatggccatttctgttttcctgtagcaaaaccagaaatcctgacttacga

SEQ ID NO: 36 - DNA, 50 bp, Homo sapiens
atttttgtccaggaactgagcagaggtgagatgattatttttggcactgc

SEQ ID NO: 37 - DNA, 48 bp, Homo sapiens
ggcttttgttttcttccctttagatgctctgcttctgtactgccagtg

SEQ ID NO: 38 - DNA, 50 bp, Homo sapiens
tttgcatttaaaggtaacaacaaaggtatatttctttttaatccaattta

SEQ ID NO: 39 - DNA, 50 bp, Homo sapiens
attccacatttctcttccattgtagagcaaatccatccccacaccctgtt

SEQ ID NO: 40 - DNA, 50 bp, Homo sapiens
gattctgacctacaaatatttacaggtaaccatttatttgttctctctcc

SEQ ID NO: 41 - DNA, 50 bp, Homo sapiens
tctatttttccctttctccccacagaaacccatgtatgaagtacagtgga

SEQ ID NO: 42 - DNA, 50 bp, Homo sapiens
tttcccagaaacaggctgagttttggtcagtatgaaacaggggctttcca

SEQ ID NO: 43 - DNA, 50 bp, Homo sapiens
taccttgttgtcttccttcctacagggaaaaccctgggtgctggagcttt

SEQ ID NO: 44 - DNA, 50 bp, Homo sapiens
actgtcgctgtaaagatgctcaagcgtaagttcctgtatggtactgcatg

SEQ ID NO: 45 - DNA, 50 bp, Homo sapiens
ctaaaatgcatgtttccaattttagcgagtgcccatttgacagaacggga

SEQ ID NO: 46 - DNA, 50 bp, Homo sapiens
ctacttggagcctgcaccattggaggtaaagccgtgtccaagctgccttt

SEQ ID NO: 47 - DNA, 50 bp, Homo sapiens
ctaaccttttcttatgtgcttttagggcccaccctggtcattacagaata

SEQ ID NO: 48 - DNA, 50 bp, Homo sapiens
ttctgcattcaaaggagtcttcctggtaagactgatttacataaatagtt

SEQ ID NO: 49 - DNA, 50 bp, Homo sapiens
tcatgacttgtttcatctctcccagcagcgatagtactaatgagtacatg

SEQ ID NO: 50 - DNA, 50 bp, Homo sapiens
gacaaaaggagatctgtgagaataggtgagtacctacctatcaagcaacc

SEQ ID NO: 51 - DNA, 50 bp, Homo sapiens
aagaaaaatcctctcttcctcacaggctcatacatagaaagagatgtgac

SEQ ID NO: 52 - DNA, 50 bp, Homo sapiens
catggctttcctcgcctccaagaatgtaagtgggagtgattctctaaaga

SEQ ID NO: 53 - DNA, 50 bp, Homo sapiens
tttcttttctcctccaacctaatagtgtattcacagagacttggcagcca

SEQ ID NO: 54 - DNA, 50 bp, Homo sapiens
ttctaattatgtggttaaaggaaacgtgagtacccattctctgcttgaca

SEQ ID NO: 55 - DNA, 50 bp, Homo sapiens
tgactctgttgtgcttctattacaggctcgactacctgtgaagtggatgg

SEQ ID NO: 56 - DNA, 50 bp, Homo sapiens
tttctttgggagctgttctctttaggtaaaatgatccttgccaaagacaa

SEQ ID NO: 57 - DNA, 50 bp, Homo sapiens
cactgctttgcaaactgtgtctcaggaagcagcccctatcctggaatgcc

SEQ ID NO: 58 - DNA, 50 bp, Homo sapiens
gccctgaacacgcacctgctgaaatgtaagagccaaaaaatttttccttt

SEQ ID NO: 59 - DNA, 50 bp, Homo sapiens
atagtaaatggcccttgtcttgcaggtatgacataatgaagacttgctgg

SEQ ID NO: 60 - DNA, 50 bp, Homo sapiens
gcagatttcagagagcaccaatcatgtgagtataccctggccaggcatag
